United States Patent Application Publication US 2025/0268953 A1 - sequence listing, part 4

SEQ ID NO: 19 - DNA, 557949 bp, Colonithrix sana
  source 1..557949: mol_type = genomic DNA
  misc_feature 317: note = n is a, c, g, or t
  misc_feature 706: note = n is a, c, g, or t
  misc_feature 359719: note = n is a, c, g, or t
  misc_feature 361330: note = n is a, c, g, or t
tgatccagcagggcaacgacctttcgcttaacgtccgcctgcatggaaacgatggcgtgccgtccacggcacagttcccgcagctcataaatgttttcgggatgcagggtagactcggagaagtgtccgaaacgaatcacctctgcgatgagcagggcgtcccgcggatctgttttggcctgacggatgtagaagctgcggatggagttggtctgcaccgggttgatgacctgaacacggaagccctccttctgaagtctggtaaaaagagcgagccagtagtgtccggtggcctccattgcaaaggaaacctcgtngttttggcctgacggatgtagaagctgcggatggagttggtctgcaccgggttgatgacctgaacacggaagccctccttctgaagtctggtaaaaagagcgagccagtagtgtccggtggcctccattgcaaaggaaacctcgtcaagcggcagcttggccttggtgagcatggccagcagccgattgtacccggagcagttgttggtgaaggaaaacgacttgatgatgacggcgccctcgccgtcaatcaccgctgcctcgtgcttcctcttggcgatgtcgatcccaacgatgtacatagtgcaggctcctctcatgttcaaattacggacattcctcgtgctgctgaaggtcacaacctgttgcgagattagaagaaagcgatnaaaacgacttgatgatgacggcgccctcgccgtcaatcaccgctgcctcgtgcttcctcttggcgatgtcgatcccaacgatgtacatagtgcaggctcctctcatgttcaaattacggacattcctcgtgctgctgaaggtcacaacctgttgcgagattagaagaaagcgattcatcgccccaacatccggctcataagtgacatcccacagggcagaggttccagtctgtgcgcagtagacttggctacaaagatagaagcaggaaattctctgtccgcatgaggatattatatcatcgctccctcaaggggcgttgataccggttttgaagatgttttgtggggagatatccccgttcgaaaatataacaagataaagggccgcagtcgcaagcgcccgcagcccgcccacaaagccccgcagtgcggggcttttcagggaaacgccaaccaccgtcggtttggcggttttacagaacaatcgcagtcggtcattcggaaaagtcccgtgtttgcagggctttgcgacgattttgaccgacgtcacagaaaggaaagaaaaaatatggatgataacaagaaaagcaccacgatctggctgcgccccagcgtgatcagccgcatggacggctggttggaagcagataactgtcaaagccgcagcgaattcgtagataaggccctgcgcttttacatgggttatctcggcaccgaggacaacacgacctacatctctcgggccatcctgacagccattcagggtacgctggacgacaacaacaatcggctctgccgcattcttttcaagtgcgcggtggaactgaatatgctgtgccacaccatcgccgcgcacttccgcgccgacccgatccacacgcgggagctgcgggcctacgccgtggacgaggtgaagcgcaccaacggtcaggtgagttttgaaagcgcggtgcggagccagcggcgcatagagccggatgacacatggcccggatcgtactgatctcgccctacctcaagggcggacagaacgcggcaaagctggcccagcgcacacgctatgtcgctacccgtcccggcgtggagctgctggcggatgagcgcagtacactccccgcgacgaaaaaaggctgctcgatgcggatgcacatgtgaacaggtttggaaacgtattctttgcgccgcaatagtcaaagaaacatttgcaaaagtagtagctttgtgcgccgggttgtggtatgtgttgtggctaccaaaaggaggtgccacaatgtatgactacatgaaagccctgcaaaagcgtttcgaccgtcaggaacacggcgaattagacgctcagattgattacgcccaagtggaactgcggcgggacatggacgccacggagcgtaagaaactactgcggctgttggacgcacagaacgcgttgctggtcgaagccaagttgatgagcttcacggcgggcttcaagctggcggccggtatcgccggagagctgggaacgccctactctttcgatgccgacgaggaagaaaaagcaaaggagatgaccacgaatggctaaaaagcgcgccaacggcgagggcaatattcgcaaacgcgcagacgggcgttgggaggggcgttacaccgcaggctaccaccccgaaaccggaaagcgcatcatcaaaaatgtacttggtaaaacgcaggcggaatgcaaggcaaagctcagtgccgcaatggaggctaccagaggaatcgatgtcagccgtgcggatgagtacacggtagcaacttggctgcgtagctggtacgacatttacgccaagccaaacataagagttgccacggcagaccgctaccatctgatggtcgagcagtacacgattccccgcatcggcagcatcaagctgacaaagttgactgcccatgacttacaaaagctctacaaggatctgatggaaaacggacgtatcgcccgaaagagcggtcatggcaatccagggctcagcagtatgaccgtgcgaagccttcacctgatgctgcacaacgctttcgagcgggcggtcaaggagcgcctgatcctgcggaacccgaccgaggactgcatcgcgccgaaggttcaaaaaatcgaaatgcagattcttccgcccgagcacatcaaggattatctggaagctgctgacaggagaggactgctccccatgttctatctggagctggtcacgggcttgcggaagggcgagatcacggcgcttctctggagcgacctcgacatccaaaacaaaaccatctccgtcagcaagcagtatataaagaatcccaatggcgaactgacgctctcccgccccaaaacagagacttcagtccgcaaggtcagcataccgcaaggggctgttgacctgctggttgccgaacacaaaaagcatcccgagaatccctacatgttcccctcgccggcaaccggcgagatgtactacccagactccgtcgtaaacctgcacaagaagatcctgaaggatgccgggctgccgcacatcagatttcacgacctcagacacaccttcgcaacgctggcactacagaatggcgtggatgtaaaaaccgtcagcagcatgctgggccactacgacgctggctttacgctccgcacctacacccacgccacacggcagatgcagcaaaaggccgcagagaaaatgggtagcttcatggcgcagatccgataagtcccacaggcaagcagagcaccggaaaggaagcaatttcctctccggtgctctttggttctttccgcgcatttccacttgtgggtcagggtgtgggtcagcagttgacccacattttgacccacaccattttcagcgtttttgcaacaaaaaagcatcgaaaaccgaagttttcgatgctttttggagctggtggtgtgactcgaacacatgacctgctgattacgaatcagctgctctaccgactgagctacaccagcgcattcgttcaaatgcaaatggaagtatagcacaaagattttttcgcgtcaagcgatttttcaaactttttgaaagcggcggccgccgctttttcattcttttcgccgtctgcggcggatgcggttgatgtggcgctcgaagtcgccgctgccgatgagctcggcaagcacatactgctcaaagaccggcacggtgcaggaatagaatcccacctcgcggcggaactgtttggaaagcacgggcggcagcaccatgtagcccacgcgcatcgacggcgcgatggtcttggagaacgtattcatgtagatgaccgagcgctcgggctcgagggcgaagagcgtatcctcgctcttgctcgacacgctgaattccgagtcgaagtcgtcctctacaatgtagccgccgcgctcctccgcccagcggagatattcgcggcgtttgcccgcgctggcggtcaccagactcgggaagctgtggaacggcgtgacatgcagcaccgtcgcgctcgcgcgggaaagctcatcggaacggatgccatcgctgccgaggcgcagcatctcgcacgtgacgccgtgcgcctgatagactctgcggatcttgtcgtaagacgggtcttcgagcgcaaacacgcgctcgcgccccaaaagctgcacgatgagtccgtagaggtattccgcgcccgagccgatcacgatctgtcccggctggacgctgatgccgcgcgagcgggagagatacgccgcaatggtgccgcgcagctcggcgcagccgttgttcggcgacttgacgagaatactctcgccgtactcgctgagtacacgccgcatcgtcttggcgagcgacgggaacggaaattcatcctccgtcccgtgagaaacggtcatgcggcgctcggtctccgtctcggagaccgggaagcagtccgccgcggcgaagctcacgaaaaagccgctgcgctcgcgggattccaaatacccctcgtcgcataggatcgccagcgcatgctcgactgtgatgacactcacgcctgtctctgttgcgatcaggcgcttgctgggcattttcgttcccagcgggtaaacaccgctgacgatgtcgcgccgcagctggtgatagagctgcaaatacgcgctctgcgcggcggttttgtcgatgtgatagtgcatagagcttactgcttctcgtccggcgcggtaggctcagcggcggcttcttccgcctccgtcgtctgctgcacacgcttgacaaacagattcgacccgtcggcctttttgaccttgaactgatagacgaggatccctgcgcacacgagcaccatcacgagcgacaacgcctgcgacacgcggatgcgctgaccaaacagcgtccagtggaaaagatacagactgtcggtgcgcagcccctcgatccagaaacggccgagaccataccagatgaagtaaaagcaggtgttctccccgtcgaagcggcgggcgcgggacacgacaaaataaagcagcagcagaccgatcacattccacaggctctcgtaaagaaacgtagggtgtacatccatatacgtcgtggccgacgtccagagccgcatgcgccagggaagctccgtcgccgcgccgaaggcctctctattcataaagttgccccaacggccgatggcctggccgatgaaaaggccctgcacgcagcaatccgtcagcgcccagaacgaaagctttttgcagcggctcaggatatacgccgtcaataagcccgcgatgacaccaccgtagatggcaaggccgccgtcccagatgcggtaggtcgacgaccagttgattgagccgtcgctgttgcggaacaggtcaaggtaaaagagcacatagtaaatgcgcgcaccgatgatggaaaacgggatagcccagagtaccgtgtcgatgacattgtcctcggtcaggccgtatttgtgcgcctgcttcatgcagaaatagagtcccagcagcatgcccgcggcgatgatgatgccgtaccagtagatgccgttgccgatgttcaatgccttggacggcacggtgaactgccagtcgccgaaaaggccgggaaagctgatgggcgcgtcagaaaagctcatgggatcgttatccttctttcttgggttcgatgatggagatggcgcggcggctgtccgtcaggttttcgcgcaggaagcgctcgacatccgctttttcgatgctcgcgtacgcctcggggaaccggagcgcatcgaagccgcggaagtagccgtccgccatggagatggcgatattttcaaacgagttgagcgcgcgcagcgtcgcgccgaagctcgcgcggcgaatctgctcgaaaaagtcagggtcgatgccctcgcgcgcgaggcgctgcgcctcttccaagatcgcgtcgctcacctgctgcggctgctcgctctcgccgcccgcgcacagcaccgcgacgcccgggagctggtcaaagccgccgccaaagctcgaattgatgagtccttcgtcataaagtcgctggtagagcggcgacgaatcgccgagcagcacgtcgctcgccatctcgccgatgagcgactggcgcaggaggtcgccctcgttcgtctcgcacttaaagccgactaaaaactgcggcagcgcgacctccatctgcgtgacggtctccttctgcgcggcagtgccgtcctcttcctcgccatagcagcgcgcgatctcctcgccgcgttcgcggggcaagacctcctcggccagcgcgatcaccgcatggggatcgacgttgccaacaacgcacagcgccatattggacggacagtagaacgcgtggtggcagtcgtacagcgtttccgccgtgatgcccgcgatgctctcgaccgtgccggcgatgggcacgcgcgctggcgacgagcggtacaggcaggcaaggagcctttcgtagacctgccagtcgggcgaatcctcgaccatgcggatctcctgaccgatgatgccgcgttccttttccacgctttcgtacgtaaagtacggaacggaaacaaacgagagcaggatgcgcaggttttcttcaaaatgctcggtgcagtcaaagtaatagcccgtcatcgcgttggaggtaaaggcgttcggctctgcgccgttttgcgagagtacctgtagggcgttgccgtccttcgtgtcgaacatcttgtgctccaaatagtgcgcgatgcccgcgggcgtgtcgcacttttcaccgtttcggatgaactgcatgtccatcccaccgtagcgcgtggcgaaaaaggcgtattttttgcggtgctggggcttagggacgatgaatatcttcaagccgttcggcagcgtcttttccaggaccgtttccccgatgcgggggtagcttttctcattcatccttgctgtcctcccctgtcaggaaatacaccgtgtcaagcgtcatgctctgcgcggcctcggcgatgcgctcgttcgtcacggcgcgcagcgccgcgatgagctcatccgccgtctcgcggatgcccgtggccgcctgaccgagggcgttttcctccatgcggcccgcgctgtcgccgcgcgattcgagcgacgcgatcaggcatgctctcgcgccctcgacctcccattcctcaaattcgccgcgctgcacggcggcaagctgggcaagaatttcacgcttggcggtctccacatccccgtgctcgatgccggacgacaccgtgacgatgcccttggatcgatgatacgaagacgaggcataatagcagagggagagcttctcgcgcacgttcaaaaagagcttggagttgctgtagccgccgaagatgaggtttgcgagcatcatcgcgctcgcgtcgttcgtgccgacacgccagcccatcgaaagcttgccctgcgtcacgtccatgcgctcggtgatctctcgcggcgtctccggcgcactcttcttttccgcgatgaccggcggcacgacatgcccgcgctggagcggcgcaaacgcgcgggagatggcctcctccacgcgctcacgctcggcgctgccgcagtagaagagctctaagtgtgcggtggagagcaactcctgatagtagcggaaaagcgtctggttcgtgatcttctcaacgcgcgcgatggagccgaacttgtccaccccgtagcgctcgccgcggcacatctcctgaagtaagcgcaggtctgcgtagtcgcgcttgtcgttgatgatgccgcggatggcgtcgatgaggttctgcttctcgctttcgacatagtcgttcaggaagcggccgttgcgcgtcacagggtcgagcagcagctcgcccaaaaggtcgcacatcggctcgagcagcttttctccacctgggacaaattcctcgtcgatgaagctcgcggcaaagccgatgcactggttctcgcccttcttgcgtaccgtgcagccgatggacgagccatagagcaggtcgagcgcggtggaaagtgagcgcatatcggggtgcgacatcgtgccgcggcgcagcacgctcggcagcagcgcgccaaagctcgccgttttttcgttgatcggcgtgatgagttgcacgctcagcgtccccgttttgaatttatccgagcgcacatagtcgaggtccacctcgggtgcgatctcaagtctgaccggttccatcacggattcctcctgtggtcatttttcagaatttgtccttaggataccacgaaactgtgaacaattccactcttttctgcttacaccgcactttccggcgcaaaaacggaagaattttctgctcgcatgacgtttttcttgcgatttttccttgacaattttgataaaatcatgtaaactgattcatgttgtaaaggcataaaactttacataagaatctgcacaaggaggaacttcccgtgaaaaaccagacctttcgtatgacgatgctcttcgacttttatggggagcttctcaccgaccgccagaaggaattctacgatctctactataacgaggacctgtcgctctccgaaattgccgagaactacggcatctcccgtcagggcgtgcgcgacgtcatcgtgcgcgcggagaactacatgaccgagatcgaagacaagacggggctcatcaagcgcttcatgcagcttcagccccacgtggaaaagatcacggacgcggccgagcagatcaagcagctcaacttccgccggtatgaggaccgccagctcgaagagcttgccggcgtgatcgaggccgaggcggcggcactcaaggagtaatacatccatggcatttgaaggactgagcgaaaagctcaacgccacattcaaacacctgcgcggcaagggccgcctgagcgaagaggacatcaagctcgcaatgcgtgaggtgcgcctggcgctcctcgaagcagacgtgagctacaaggtcgtcaaggactttgtcaagaccgtgtccgagcgcgctgtcggtgccgaggtgctcgacagcctgacccctgcccagcaggtcatcaagatcgtcagcgaagagctcaccgcgctcatgggcggtgccaatgcgaagctgaccttcgcctccaagccgccgacggtcgtcatgatggtcggcttacagggcgccggtaagacgacgaacgtcgccaagctcgcgggctacttccgcaagcagggccaccgtccgctgctcaccgcgtgcgacgtgtaccgtcccgcggccatcacgcagttacaggtcgtcggcaagcaattgaatattcccgttttcgaaatgggtcagatcgatcccgttcagatcgcgcaggaggccgtcaagtacgccggtgaccacggcaacgacatggtcttcctcgataccgcaggccgcctgcacatcgacgaagcgctgatggacgagctcaagcgcatcaaggccgccgtcaagccgaccgagatcctgctcgtcgtcgacgcgatgaccggtcaggacgccgtgaacgccgccaccgcctttgatgaggcactcggcatcgacggcgtcgtgctcacgaagctcgacggcgacgcccgcggcggcgcagccctctcgatccgcgcggcgaccggcaagcccatcaagttcatgggcacgggcgaaaagctcgacatgatcgagcccttccaccccgaccgcatggcgcagcgcatcctcggcatgggcgacgtgctgtcgttcatcgagcgcgccgagcagagcatcgacgaggaaaaggcgaaaaagctcgaagaaaagctcaaaaagaaccgcttcaccctctctgattattacgaccagctcgtccagctcaagagcatgggcagctttgaacagctcgcgggcatgatgcccggccagctcggcaagcagatggcaaatgccgagcttgaccccaagatgatggcgcacaccgaggcgatcatcctctcgatgacgccctacgagcgcgagaatcccgcggtgctcggtgccagccgcaaaaagcgtatcgctgccggctgcggactcgaggtcgtggatgtcaaccgcctgctcaagcagtttgagatgatgcagagcatgatcaagcaggtcacgcgcggcggcaagatgccaaagggcatgggcggtttcggcggcggccggatgcgcggtttcgggcgcaagaaacgcttcaagtaatttccgttgataagtgcacaagcatttcatcataatacaaaatcatttacattatttttggaggtagtaaccatggttaaaattcgtctgcgcagaatgggcgccaagaaggctcctttctatcgtgttgtcgtcgctgattcccgttatccccgcgacggccgcttcatcgaagagatcggcacctacaatccctgcgtctcccccgccgagatcaagatcgacgctgagcgcgctcaggagtggatcaagaccggcgctcagcccaccgacactgtccgtgcgctgctgaagaaagtcaacgcgctgtaagacccggggtgcaagaaatgaaagacttgctgctctacatcgcccgcagccttgttgagcatcccgatgacgtcaccgtcacggagaagcagggcgcggacgagcttacgttggagctgcgcgtcgcacctgacgatatgggcaaggtcatcggccgtcagggccgcattgccaaggagatccgcacggtcgtccgttcctatgctcagcgcaccggcgtaaaggtgtctgtcgacatcgtagactgaactgcaaaaacgttcccgagaagctctcgggaacgttttttattcttgccatcccccgccgattccgctatactggatggatagaacaaaacaaaggagcatgacaatgggtctcttttccaaaaagagcgcgccgcagccgagcgcgcgcccggaatatatcgaagtcggccagatcgtgaacacgcacggcgtgcgcggcgaggtcaaagtacagccctgggacgtaagtcccgagcttttgtgcgggttcaaaacgttctacatggacggtgcgcccttccgcccgacgagcaagcgcgtgcagggcgacatggtgctcatgaagctgcccgaggtcgacgacatggatgctgccgccgcgctcaagcgcaaggtgctctccatccgccgcaatgatgtccagctcaagcccggcgagcacttcgacgccgagatcatcggcatgaacgtttacaactacttcccccacacgtatatcggcacggtggtggatgtgctctcctaccccgcccacaagctctacaaggtcaaaggcgaggagaagacctatctcatccccgcggtgaaggatatcttcatcacggacatcgacgaggaatcgcgcgagatcagcgtgcatatgatcgaggggttagagaccgatgaggattgatattttaacactcttccccgcttcggtcgacgcgatgatgaacgtcagcatcctcggccgcgcgcaggagcgcggctacatcacgatcaagacgcaccagatccgcgactacacgacgaacaagcagatgcaggtcgacgactacccctacggcggcgggcgcggcgcggtgatgcaggccgaccccttataccgctgctgggcgcatgtgtgcgaggaggctggcagccgcgggcatacgatctacctctccccctgtgggcgcacattcacgcagagcgtggcgcgtgagctgaaggacaactatgaccatctcatcttagtctgcggccactacgagggcattgaccagcgctttatcgacgagtgcgtggacgaagagctctcgatgggcgacttcgtcgtcacgggcggcgaaattcccgccatggccgtgacggacgccatctgccgcatggtcccgggcgtgctgcccgaggaggaatgcttcaccgaggagtcccactgggctgggcttttggagtatccgcagtattcccgccccgatgaatggcatggccgccgcgtgccggacgtgctgctctccggccaccacgaaaacgtagccaaatggcgcaaaaaggagagctacaagcgcacaatgctccgccgtcccgacctctgggcacagtttgacgaaaagcagctcaaaacaaagagcgagaaaaaagtcctcgccgaagccaagtccgaagcagaagccatcctcgccgcggaggcggagaaggccgaggaaagcgacaccgaaacaactgttgagtaacagctcgcgttatctgcacaaggcaaggccaacggtcaatcgacttcatttgccgcccgcaggcggcaaagtattttgatccgtcgcggaggacgacacgcgcgtccgcagcgacactttgcaggaaatggcgcggtgagcaccatttcctgaagctctctcatcaagaagcagcttcgctgctttttgatgaagtaaaaaagcggaacagcctaagctgttccgctttctttatgtacttttacgcgatgcgcttcgcgccgacgtagcgggaagcatagtagctcgcggacaggctgtcgatcatgaccttgccaacgctgtagcgcgcgtggatgatctgaccattgccgatgtagatgccgacgtggccgatggcgtgtgaggaatccgagaagaacaccagatcaccgggctgcaaatcggatttggcgacggcgtagccgcagttcttatactgggcggtcgccgagtgcggcagggagtagccgagctgcgcgtagagatacatcgtgaagcccgagcagtcaaagccgttgggggacgcgccgccggagcggtagcgcgtgccgaggaagggcatcgccatggagacgaccttcgcgcccaccgtgccgtcgaggtcggcaggatcgcgcagatattcaccgagcagccagccggtcgtcgagtcaaacgtgacctgataccagccgttcgactcaccgacgacggtgacctgcttgccgctgaccacctgcgtgatcttgtcgtaatttgtgccggggcccgtgcgcacgttgatcgtgccgcccgtgacgaccatggagacggtctcggtctcgctcacgtcttccttggcgtcagccttgtcttcaagctctgcctgcatctcatcgagcttggcgagctcttcttcgttcgcgctctcggtctgaacggattccgtcagcaccgtcacgcggtcaacaaggttgcggatcgaaccgtcgtaagcggcctgcgccgaagagagcggcgcgagcaggctgacggagagaatgcccgaaagcaggaacgataagcatcgtgaatggtttctcatagcggagtcatcctttcgtgaataaaatcagggggctgcgcggcggctatttacatcttgccgctcagcgcgcgctcaagccagatggtggcaaattccatcgcctcgccgaggcttcctttttccgtcgagcggaccacacggtcgcgcgaacggaggcttgcgtccgtcatctgcaactgaatggaaacgcgcttggcaagcgtgatatccttgagcggcgtggtatccaacacctgcatcatcacgatatatttatccgccatcgagccgtagtagatgagattatccacacggcgcagcgggtgtccgcggtaaacgagaccttccgtagcttctgccatctgactcactcctgtccttgtaaccaatttgtaactttgtaaccgttttgtaactttttgcagtatagcattttttaccccccttgtcaataaaagtggggcgaaaaaatgcaacaaaccctcggaggccgcgttcacggtctccgagggtcgttattttgacggttttcgcttactttccgaggtagctgcgcacaagcgtttgcagcagctcgtcgcgatccagcttgcggatcagcgtgcgggcgttgttatggttcgtgatataggtggggtcctccgacaggatgtagcccacgatctggttgatgggattatagcccttatcctccagcgcggcataaacggtggtcagaatatgacggatctcagcgtccttttcctgcacaacattaaactttcgggtaaattcttccattgggagagcccctcctttccatgcagacagtatagcaacgcaatctcaaaaagtaaagagagcgctgtcaactgtaaccaaatcgtaatgtttccttaaggaattctcagcggagcaccgcgttgtggtcggccttgagcgctgcgaggatggactggacgtcctcatctgcctcttcgccggtcaggctgcggtcgtccgcgcgcagaacaaggttgaacgccacgctcttcttgccgatggccacgccggggccgcggtaaatatcgaacagcgacacatccttcaaaaggcccttcgcgccgcggcggatgctctcttcaagcgcgccgaccgtgacggcctcgtcgcacacgacggcgatgtcgcgcgtgacggcggggaacttcggaagcggctggtagacagggatgtcgccgcgcttttcatacatcgcatcgaagctcagctctgcggtgtagacctcggtgtccatgccgtagttcgccgcgacgagcggatggatctggccgaacacgccgagatacgtctcgcccgcatacaccttcgcgcagcggccggggtgataagaatcattgtcggtgcaggcgacgtacttgacatccgtgatgcgcagctcgtgcagcagcgtctcgatgctgcccttgaaggagaagaagtccacgccgtcgccgtaagcgccgagggagaggtacttcggctcgtcagcaaggccatcctcgcgcggcaggtaaattttgccgagctcatagaggcgggcggacttgttgcggtagctgtggttgcgggcaatgatctcgagcatgctcggcaggatcgtcgtgcgcatgatggaggtatcctcgcccagcgggttcaaaatcttcagggaattgcgcagcgaggaatccttcggcatgcggatcttatcgtaataggtcgggctgatgaaggaataggtgatgatctcatcgtagcccagcgcgcgcacagcgccgccgatggcacggtcgaagcgctgctgctcgctaaagccgccgcgcgtggtctcgccgcgcatgagcgtgcagggaatcttattgtagccgtagaagcgcgcgacctcttcggcaatgtcgctgtaatgctcgacgtcgccgcgccaggacggcacgtagatgtcgtcgccattcaggataaagccgagggagacaagaatttcgcgcatcaggtcttcgctgagttccgtgccgagcagggcgttgatcttgtcgggttcgagcttgacgaccgtgggggccttttccttggcgaccacgtccatcacgccgtcgacgacctcgccgcagccgagcagctccacgagctcgcaggctcgctcgacggccttgatggtgttcatcatgtcgaggcccttttcatagcgggaggaggcgtcggtgcgcatgccgagggcgctggccgtgcggcgcacggaaacgccgttgaagttagcggactcaaagagcaccatcgccgtgtcgccgacgatctcgctgttcgcgccgcccatgacgcccgcgacacagacgggcttgtgctcgtcgcagatgcagagcatgttctccgtcagcttgcgctcgttgccgtcgagcgtctggatggtctcgccctcgcgcgcggtgcgcacgatgatgtggccgccttcgacgcagctgaagtcaaaggcgtgcatcggctggccgtattcgagcatcacatagttcgtgatatcgacgatgttgttgatggggcgcacgccgctgttgcgcaatctctcgcgcatccagcgcggagacggagcgatcttgacgtttttcaccatgcgcgcggtgtagcgcgggcagaggtcgccgtcctcaatgtcgatgtcgacaaggtcggcgatgctgccgccgcagccgtgcggctcgggcgtgtgcagcttaagggggcgcttgaacgtcgcgctcgcctcgcgggcaaggccgatgacggaaaggcagtcggggcggttcggcgtgatctcaaactcgacgatggaatcgtcaaagccgaggatgtgcgccatgttgaggcccggctcggcgtcctcttcctgtaagacaaagataccgtcggcgatgcagtgagggaactccttctgctcggcgtgcaggtcctcgagcgtgcagatcgtgtcgctcttcgtgttgtacgcgacaaggtcgccctcgtggaggttcgagcagacagtcttcgccgcacgggtgactgtgccgtcgttcacgcggacattatagccgacgtcaacgctctccaccgcctcgacgcggccgcagagcacagggccgtagaccttgtcgccgggcttgatgtcagcggggatggagggcttcgcggggtcgatgggatgatagtcgttcagaagcgccgcgggcgtgatgacggcataggggaagtcatgctccgccgtcatgccaagctccttgagcgagcagagcatgccgttcgactcgacgccgcgcagcttgcccttttcgatcttcacaccgcccggcagatgcgcgccatgcagcgccgcggggacatagtcgcccacgtggatgttccacgcgccggtaacgatctgcacgggctcggcctgaccgacgtcgatctggcagacccacatgtggtcggagttttcatggcgcttcatctcgagaattttgccgacgaccacgttcttgaggttctcgtcgggacgctcgatggtctcgaccttcgagccggagagcgtcatctcgtcattgaattccttatcggtgatatccttgaggtcaacgaattcgttgagccaattacgggataggatcatatttgtatcctcctaagaagtaacaatcaaatttcgttttttgtgacgacatgcgcgtcacaaaaaacaccgctcagggtgcaagcgtgcgagcaaagcgagtgcggcgcagcaccctgcgaaagagatcgcagaaagcggctcgccgctttcgcgaggaatattagaactgttcgaggaagcggacatcgttctcgaagatcaaacgcaggtcgctgatcttgaagtggccgagcgccagacgctcaaggcccatgccgaacgcccagccggaatagaccgtggagtcgatgccgcagccctcgaggaccttcgggtggatcatgccggcgccgagcacctcgatccagccctcgcccttgcaggtggggcagcctgcgccgtggcacttgtggcactgaatgtccatttcgcagctcggctcggtgaacgggaagtgatgggggcggaagcgcgtgaccgtgtgctcgccgtagagctggcgcacgacctcgttgagcgtgcccttgaggtccgccatcgtaatgcccttgtcgatggccatgccctcgatctggtggaacatgggcgagtgcgtggcgtcgacctcgtccttgcggtacacgcggccgggggcgagaatgcggatgggcagctcgcgcgtctccatcgcgtggatctgcatcggagaggtctgcgtgcgcagaaggatcgagctgtcctcggtgaagtagaacgtgtcgctccactcgcgggcgggatggccctcctcgacgttgagcttcgtgaagttgtactcggcaagttcgacctcgcggtcttcgagaatttcaaagcccatgccgacgaagatgtccttgatctcgtcgagcacctgatacatcgggtgcttcacgccgatcttttcctgcttgccggggatggtcacgtccacggcctcggacttgagcttgagctccatggccttgtcggcgagctctttcgtcttttcctcgatgttcgcttcgagcttggcgcgcacgtcgttggcgagctgcccgatcacggggcgctcttcggcgctgagcttgcccatctgcttcaaaacggcggtcagctccccttttttgccaaggtagcggacgcgcagcgcttcgaggtcctccgccttgccggcgtcggagatcgcatcgagcgccgccttgcggatcgcttccagttgttctttcatatcatttctccttttcaggtaaaaatttgcagaatttcaaaaatcggcggcaggggcaaaaaaatagcctttcctcccgacactctcgggacgaaagactttcttccgcggtaccaccctgattcgcgcccaaaggcgcgcgctcgttgcccgtaacgggggctgaccggccgcgcatttcctcgcggctgctcgggggcgaaccaagcgacatcccgcagaccggctcccagccgccgaccggtcctctctacgcggaacaaacacgctattttccctttcacagcatttgtctaagtggtacttatatcacagaaaaaaggaacttgcaagggggaatttgccccttgccggcaaaaaagcggcaaaagcgcaaaatatcgcgcattttcctctgcgcactccccttttcctgcccaaaacgcggaaaagccgcactttacaacgtgcaaaaacgtgatatactataatagttgtttataaacccaccgtggctgctctcgcagctggataaggagaacgatcatggacgaaagaaagcgtctttacaagtcccgcaacaacaagatgatctgcggcgtctgcgcaggcatcgcagactacttcaacattgacccgtcgatcgtgcgcgtgctctgggcggtcctcgctctggccgccggtaccggcgtgctcgcctatattgcctgcgcgatcatcctgcccgagggcgacaccgaggtctgaccgcttgacaatccgcgcaaaaaagatatactaaatcctgttcgccgcgcgaaacggcagaaaaagatgtaaaacgcgaagggagcttccttttatggcgacttatccgatgcatgtcgcgggtcttgaccgcgactttcccatctgcaaggtaacggacgatctttatatcggtgctttcatcatgttcggcgacgcggagctgactgtgcgctgcgcagaagagctcttgaagctcgccgagggcatcgactacgattacctcttcaccgctgaggcaaagtccatccccctcatccacgagatggcgcgccagagcggcgcgaaaaagtattttatcgcgcgcaagggccccaaggtctacatgcccgaccccatttccgtggaggacaagtccatcaccaccgtcgcccagcagaagctttttctcggctctgacgacgcggatctcatccgcggcaagaagattttgctcgtcgacgatgtcatctccacgggcggctcgctcaaggcgatggaagcactcgtcgaaaaggcgggcggcaccgttacgggccgcatggccgttctcgccgagggcggcgcagccgaccgcaaggacatcctgttccttgaaaagctgcccgtcttcaacgccgacggcagcgtgaagtaaaaagattcaatcgcagaagcgcaaagcgcctttcaaagagctttctttgaaaggcgctttctctgttattcggtgatctcctcgcagaccgtcggcgatgtaggccttgcttcggactccggcgctgttcttagtccgctcaaaccgcggcggcagcgcacgcagcccgccgcgcatacggcggccatgacggcaaggaactgccacttctccgcaaaaccgcccaaaagccccagcgggtcgttcattgcgttgaacgcggcgtgcgcggcgatcgtgggcaggatgctccccgtgcgatagcgaatatagccgaaaagcaggcccatgagaaacgcgtagccgatctgcaccggcgttccgtggatgaatccaaagagtaccgcttgcagtacaattgcgatccacaccggcatggcccgttccaaccgcgactggatgacgccgcggaacacgagctcctccgcaagcggcgcgccggccaccacggcaagcgccgggatcagccccgtctctgtgctcaggcgcatggcttttccatattcctccatccagctttccggcagcagggcaagcaccagactgaccagcacatagaggccgaccgcgccgaaggcgcagaagcccaccgtccatccatagcagtgacgaaggcccgccgcctcggatagcggctttttccgcagcaggaaccacagcagcagtaccgcggcgatgatcagacacgatagcagcgtgagcgccgacaggccgtcaagaagccgctccgccaccgcctgcgccccctgtgcaaggtccactcccctattgatcgccgcatcggcagcgataccgatcccatagacaaagggcagcaaaacctgcaccgccacgaaaaagagctgatacaaagcggatctccccagcgcagccaaaacgccctttgcggaatagaaatgctcggttttcatatcttccccctccttgtccggtcctaaaattgccgcagcctccattttgtgtgcgggccacttcaagcaagcccggcgcagtgaatgccagcgcgttttattcgtcttttagttgaaaatattcatttatctctatactgtttgtttaattatactgtattatcagatgcttgtaaacagcactttgtgaaaagcaatctttcggcaacggcctgtatttgtccggtccatcatacagtttatgatacagtgagcttctgcgttctcctcacttttcgtcagttttactaaaaatattttagttttttctgctggacaagtgcaaaagaacgtagtatcctataaaaaataaacgaggaagatggatgattcatccgataaactggtcaaacacaacaaaataaggaggaaaacgcatggcataccgggaaagctacgcaggcaagatcaaccgcaagctgaacaagaagctccacgtcgtcgaggtggcctcgggacggcagaaggccgacctcgtgctcaagaacgcgacgtatgtgaacgtcttctgcaacgagctcagtcatggcgacatcgccgtggccgaagggctgatcgcaggcatgggcgagcattacgagggtgcggtcgaggtcgacatgggcggcaagctcgtgctgcccggctttgtcgatgcgcacatccatttggagagcgcactcgtctctcccaaggaatttgccaacgccgtcgttccgcacggcaccacgaccgtcatcaccgacccgcacgagatcgccaatgtcatgggcaccgacggcatcgagtatatgctgcaggcgacggaagatctgcccgttgacgtgcgcttcatgctcccctcctgcgtgcccgcaacgccgctcgacgaatccggcgcggtgctcgattaccgcgcgatcgactcgttctacgagcacaaccgcgtcgagggtctggccgaaatgatgaactatgtcggcgtcgcgaacgccgacgagcaggtgctcgaaaagatcgtcgccgcgcaggcgcaccacaaaaaaatcgacggccacgcccccggcctttcgggcaacgacctgaacgcctacatcgccgccggcgtctattccgaccacgagtgcagcaccgtggaggatgccatcgccaagctcgagcgcggacagtacatcatgatccgcgagggcacggccgcgcgcaacctcgatgcgctgctcccgctgctcacaccgcagtattacacctactgcatgttctgcacggacgacaagcacccgaacgatcttctcgaaaagggccacatcgactacatcgtgcgccgtgccatcaaggcgggtgtcgacccgatcatcgccgtcaaatgcgcgagccaccacgccgcgcgctacttcctgctcaataaccgcggcgcgatcgcaccgggctttcttgcggactttgtcgtgatcgacaatttcgacgacttcaacatccttgaggtctacaagaagggcaagctgatgttcgacggcaagaccgtcacgccgtttgaagcgcccgagatcgatccgcacctcgtcaagcgctcgcacgagacgttccacgttgcgcaccttgaggccacggactttatcgagtcccgcccgcgcgcggtgctcggcatggtgcccggcgagatcgtcacgaccgatgcgggctacgccgaaaagatcagcgttgaggacgacatcttgaaaattgccgtcatcgagcgccacaagaacacgcaccacatcggcatcggctacatcaagggctacggcctcaagtccggcgcggtggcgacatccatctcgcacgacagccacaacatcatcgtcgtcggcgcgaacgaggaggacatggccgcggcggtcaaccgcgtcgtcgagctcggcggcggcatcgtcgtgatggacgacggcaaggtgctcggcgagctccagctccagattgcaggcatcatgagcgaagcgccgcttatcgaggtcaacgaggcgctcgaaaacgccaaggagcaggccttcaagctcggcgtctcgcgcggggtcgacccgtttatgacgctctcgttcatggcgctgaccgtcattccaacgctgcgcctcacgacgcgcggcgtgttcgacgtcatcaatcagcgctacgtgtgatcttacattgtgaaaggctccggtgcagtgcgccggagccttttttcgaaaagttttgcttgcaaatgctccctgcatcgcatataataattgttgcacctgccggtgtgatggaattggtagacgtagcggattcaaaatccgccgatggcgacatcgtgtgggttcgagtcccaccaccggcaccatcctccgaaacgcttgatccctcagcatttgaggcatcaggcgtttcttcttttctcccatgaaaagcatccatttcgctctgttttttcacagttctctccgcagttctctccacaatcctctttcaaacgcttgtgctgatgcctggttcaatgataacaacattgctcatcttcgatgctgaagtgttttttgacgatgtgtccagatgtgcgtagatatttgcggtcgtgttatagctactgtgtccaagccactcctgtatatccttcattggcacgccattttttagcagcagcgaagcgcaggtatgtctcaagtcgtgaaagcgaatattgcgcaagtgatttttcctcaagatgagcttgaaatgctgtgttacatagttcggctgatagggtgctcccatatcgtttacaaagatatactcgctttctgtataacaatttccacacagcttccgacagtattcctgccgtactttcatacgcagcaaaaggtcgcggtattgcggaaccaacggcattgagcggcagcttgactgattttttgtacgatccttttcgaccgtgatggtcgtcccatcgcacatacactgaacaactgtatggtcaatcgtaattagattgctctcaaagtcgatcgccctccaccggagtcccatgatctcacttcttcgcaggccataaaaggctgccattagaacagggaactcgcaaggatcacccttcaccgcctgaaagagcgtttctagttccgacacagaataaaatgctccaacatacctttggctctttggccgctccacattatccatcggattcgaggcaattaaatcgtgtttacgagcatacttcattgccttatggatattcgcatgaaaacgctgaaccgtagttccttttaggtgcagttcattgaagcaatagctgtaaaaattctccacatccagcgcagtcagctctctgagcagtattctttgtccacgaaaatatgggacaattcgcttttcaacattgtttacatatcccgcatatgtatctacctccacagagttcttgatgatacccaaccacttgatcatgtagtcagaaaaagaaatatcttctctgctgatcacgggagatactgcacaaggtgatgcagcatctttataggtgcatctggtttcggctaacatttcttccgccaactttgcacttttcttcccagttgccggtatccctgttgaaatccatttggacttgcgattgccatcttcggatttcaaattcagcaccatgtaatagtaacctttttttgtttgcagatgacccgctaccatgttgttcctcctttttgtagcggtacaacctatctgtcaatggcagatcaattataccataagcagatgttctctccaatgtgcctataaactttattttgaaatccttgcgccgaaattttgccgtcagccaagcagatactcgatcacgcaaatctttggtatcttaaatgacttaccaattttcagatggtgaatctcaccattccccaacaatttgtaagctgttttcatgctgattccgcccaacatgatgcacatctgcctaacggataccacatcaggatattctgcaaacagctttccttgatacgtaagagccatgacacaactcctctctcaaataatattgattgacaggcaaacgacaaaggagatgcccccgttcgtcgagggcatctcctttttatcagcctaatcataccatagtgtcatatgacacttcaagtacatcggctcggacatttttaggacattttcaaaaatcagacttgaaaccgatcggaataggcatacatctccgtaaggttttcaatggcagtacgcttgatccggtcgatggtgcggtaggtcaagccaaagcttgcagcaacttccttcgtgggagtgccgtccacaaacaccagacgaatcacctcagcctgccgcttatccaatagaccaataaagtatgtcaggcgtctctgctcacattccaaagcaaacagttcctttgcaatttcgtgtgccgactctgcattcatgcgttccgcctgttcttcgtaattgagcgcaatgtaaagggtcttattggaaatatgtcccgtactatgcccaagactatcgtcatgtctgaaattcatggcttcaatctgttctgcacggctgactgtggtcgggtgctccaaattataccgaagcaccgcaatcttgcgttcacgctcgttatagctctccaacagcttcaaaacgtacttactcatagcactttcctttctgttatagatttttgattgccatgagcgctgcaggcggagaacggcagcgaatctgtcggttgcctgatatggcaaagcaaaaggcactttcacggatatcataacccgcgaaagtgccttgagaaaatatggagttatcccaactacggaagcgcagcgatccatggttgaaatcaagatcgtatagaagccgacgcacaccctctctgtgcggcatcccgcactgaacggccgtcaagaatatctctgctagcttgtccttcggaaaatatgcgtttaatatcctgccaacatgctgtaaaaactcacttagaagtgccgcagcatacatcttgcggtagaacttcatccgccgtttatggagaagatactgcaatccgtatgctacgaaggcatcatacaaagtctcctcccgttaatgaagtatagaacacctttgtatgctgaattaacacattcatacttgtcatactgcattataagattatgtcgaggtgagttataatgcaggaagcgaagattaacttaggcaaggtcgttcgcatagcccgcaagcgcaagaggatcacacaggactatcttgcagaaaaggtcggggttcagccacgaacgattctggaaatagagaatggcaggggaaatccccgttttgaaaatctgtttgtgatggttcgcctgctggacatcgcccctaatgatatttttaattacgattgcggtctggcgcaggataccgaacagctttttcaggagttgtccagttttagtgaagaggaacagcgcatggctgcagttgccgccagagcagtgctgcagcagattcgctatgagaaggaacactgcaaagaagaggtttcaaacaaaacgaacggctgagagaaggtaaacgcctctcccagccgttttgcatgatggctcatagcagcgtctatctttacttgatcatttcggactgcttcacttacacatcaaaatgcgatatataaaactcttttgtgtctcctactatacttattacgatgaagtcctcctattttggacgcttccagaaaagttatcgccttttcttttattttcaagcggctccccagtacagaccagtcataggcttcaaaccgatccaataggggggaaacttgctcttcgaaaatccgttacagcatttttacaatactcgcgcaggatatggcaatcatatcagtagccttcattgacaactttccaatggccattgacgaactctaaaaagatcgttcgatcgggctcctgcgcgatgccgcctttgctcacgcagacggaaaaagaaatttcattttctgtccggctcttcaattccaaagagacaacttcaaagactgtattctcataatagactctggctgcttcatctgctattttcaattcttcatttcaattgtacttattatatcatatatgtataacaaaagtatcgttgaaatattgcacatatctatgtaatcaagcggcttgcaccttagtcggattacctgctccgacagcaggttttgggtttaaccaaagaggccggagaacaggataaccagagtgatgccgatgagagccacgccgccggccatcaactgctttacaccaggagacttcacatggaggtcaccgcatatcgtcactgcaaggccccgtcctcttgtaatgtcaatacgctaacgaaaatatttttcactgtctggccgttgctgcaataataatctcaagagtaaaattcctatgaaaagtcagaggcgctggcaccggagcatagctcccgtgaactgaaccgggaattcgaggacaagctggtgttcaccgttctgcggcgggcaggcagcaagctgttcctgccgatgtccatccggacgtttattgccgtgttccgctctgtcaagtacatccgggcggggctgacctctttgctccatggccgtctggctgcgtcgattctggatgctactgccgtgactgtgtccatggtccggggggatttcgacaccgccagctccgtgatgttcatgctgaacctgggcgagatcctggaggactggacccacaagaagtctgtggcagacctggcaggcgccatgtcgttgaatgtggacaaggtttggctgaaggccggcggcaccgaagtgctggtccctatcggagatgtgaaggccggggactgcatcgtggtccgcaccggcggtatgatccctctggacggcaaggtggtggaaggggaagccaccgtcaatcaatcgtctattaccggtgagtccatgccggtgcccaagggccccggcagctatgtctacgccggaacggtgacagaagagggagaatgcgttatccgggtggataaggcggccggcggcggccggtacgaccggatcgtgaggatgatcgaggaattggaaaagctgaaatccacagcagaggacaaggcatcccggctggcgaaccgtctggtgccctatacgctgggcggcacggccctgacctatcttctgacacggaataccatgaaggccctggccgtcctgatggtggacttttcctgcgcattgaagctgtccatgcccatcgccgttctcttcgccatgcgggagagccagaactatcatatctccgtcaagggcggccgcttcatggaggcggtggccaacgctgatacggtggtgttcgacaagaccggcaccctgacctacgcgacccccacggtggccaaagtggtggccttcgatggctacagcgccagtgagatgctgcggctggccgcctgcctggaggagcattacccccattccatggccaatgccgtggtggcagaggccaagcgattgggcctggaccacaaggagtaccactctcaggtggaatatgtgtggcccacgggatctccagctctgtggaggacagaaaggtcatcatcggcagcgctcacttcgtttttgaggatgagggctacgtgattccggagggtgaggaggaaaaattcaatgccctgccggaggaatattctcacctgtatctgtgcattgtcggccgtctggcagcggagatctgcattgcggatcccctgcggaaggaagccaaggctgccattgaagcgctgcacgcctgcggcatcagcaaggtggtcatgatgaccggtgacaatcgcaagaccgcccaggccgttgcccgggaggtgggcgtggatcagttctacgctgatgtgcttccggaggataaggccagcttcatccggcaggagaaatcggcgggccggaaggtcatcatgatcggcgacggcgtcaacgacacccctgccctttccgaagcggatgtgggcatcgccatcaacaccggcgccgccatcgcccgggaaatcgccgatgtgaccatcgcctcggaggatcttttcgagctggtgaccctgcggaaaatcagtcaggccctgatgaaccgcattcatcggaactaccggttcatcgtcggcttcaactgcatgctcatcgctttgggcgtggcgggcgtcattcagcccaccacctccgccctgctgcacaacgcgtccacgctgggcatcagtctggacagcatgacggatctcttggacaaggagaaagagtgcaaagagccggaagcataaacagcaggtcgggatcatccgtaaaacgggtggcttgcataagccctgaaagaggataagaaaagctgtgccccagggcatggtgaatatgctgacagcatacgatttcgcacagccccctatttgtcaggcagtaagatatactgcctgacaaatagggggctttattatgtcggagggagtaccaaacaagcgctatccaccggaattcaagaagctggtgattaagccatgcggaaagaaaaattgagttacagcaaagcagcacggagatttgaggtaaatagccactgcggaatccaagagggtgtggagcgcgtctatctggccgaaggaccggagggcttttctatcttaaacggcgtggccgcagcagcaagggacggctgtccaaataactgctgaaggaagggaaagaagacctgccggttattcttccgtccggcgtcaaactgccccgcgcggccttttacgatcattacggtgatccccaatgaagaaaacaaggagttttgccgttccactgtttttggtcatgatccctcacttttatcagatctgaatggttacccgcttggcaggcatttgttctgtatgctcatgtcggatgggtgaaagcgagacctttcgaccaggatcataccgggcaggagatgccagcagaacagctctatgacgagcagcttgtatttttgttgacagcatcattttatgacgttataatatgacctaaaaagcaaatgtggtcataaattcaaacgaggtgtgggccatggcttttacagacgaacagagtcgattgatttgcaggaatctgatccgcgaagcgcggtgctgcggcgttaccgttgggatgcgaaagaccactgtggagcaactggcaaatgctgtcggaatctccaaaggttcgttctacaagttttttgactccaaggaactcctgtttttcgctatgctggaggatattcatgccgagtgctttgcggcggcgcagaacgccttgcaggagaatgcggcgttgcttcctgctgaccgcgcagctgcggcaattctggcagcctgccggtggctctccgaggcaaaagccttcgtgttcatcgaaaatgacgcggagtttctcctgcacagactgccggaggaggtcaaaacggctcactaccacgatgacgagacgcacatccgcacactgctggaagcgggcggtttgcagccaaagggcggcatggcgctggcggctgccacggtacgggggctcattctgactgtctcccatcagggacagatcggagcgctttacccgcaggtgctggaaacgctggtgcgcggcgcctgccgggagctatttgcataagcggaaaggctgcagcgatgcagcttttcaaaagagtacgagttagcttgctctaacctaatctttcacatacttgagttagatgaatttaacaaatgcgcaggagcggggcactgtgctgggactgatcacaaaggaaaagatcagacaaaactcactgcatttcaaggccatctgtgttccggggaccggaatactgctgtaaggaggaatctgccgatgtcaaagaaagccaccgagtttcagaaaaaagaaatgagcagaatgtaccggggtaaggatatcttcaagcccctgaacaccggctgggtggacgaacatgtggcctgtgtgcgggagtgggtggcgaacatcttcttctaccgcaaaggcgataccaatattatgatcgacgccgggtacaactacgaccggctggaggaaaaaatgggctggctgggcatcgacccgcagtccatccggcatatttttatcacccaccaggataccgaccatgtgggtgcagtggaggcagacagccccggtctgttccggaatgcaaaactctatatcagcgagaccgagaaccgctatctcacaggagaagtgcgccgcaaggtcatctaccacctctacaagctgccgcaggtgaccatcaacaatgagagggtgctgctcacagatggacagattcttgacattgacggcattaaaattgagtgctttctagtccccggccatacatgggggcatatggtctatctggtcgacgacaaatacctctttaccggcgataccctctggttcggggccgacggcggctacagcttcatttcctccctggcggaggacaatcgtctggcaatgaagtcattggcggcgctggaggcaaagctgcaaagccgcagactgcatccgctgtttctcaccggtcacacaggctggacggataattttgactttgctttcgcccataaagataagctgtgctcaccgttcaaaaaacgggttcctgacccggctgcgccctatgatgcttacgacgaatcggatgacactgaggagcgtgcaaagcacggatttttaaaaggagtgggagaacatgaagcacctgcactttaatgtggagcctgacggcttctacggcgcgtattgggcgtgcgacggcggggcgggctgcgcggtgatcgccatgatcggggatgatccggaggatcggctggcccgctcggccgcgaaatggctctgcgggcgcggcgtaaacgtcctcaccatgtcccctgcgaaaaaggactacggccatcataattacccgcttgagcgcatagaagcggccatttcgtggctgaaggccaacggcagcccaaaaatcggcattgccggggcctccaccaccggaacactggcgctgacggcggcgtccatgtttccggagatcaccctgaccattgccctgacgcccagcgattttgtgtggcagggtttcatgcagggcaaaagggacggctgcaaggaatggccggtcgagggcgagtcgctgttctcctaccggggcaagccgctgccctatatgccgttttgctatcagcatcccgattattggcactgcgtcgccgccgagagcaagcgcaccggcgatatggtcaactcccgcaagctgtttgatgattccgaggcggtgcatccgatcgagccggaagaatatattcctgttgaaaacatccggggaaagctgctgctgatcggcgcggaggacgatgcgctgtgggataccgcaaagtatatccgccgtatggaaaagcaccttgcggaaaagccccatgaatgcgaggttgagacggcggtttatgcccacggcacccactttgttttcccggagggaatgttgaagatcatgctgcctatgggagcaggtctcttcgtccgtctggcatttcaggcagcaaagcagtttccggaagcgtgcagacagacacgccaggatattgaccgccgcgtgagcgcagccatccacacatggacgagcacggagtaaacgccggcatcggcacaggcgcatggcattccattggagaaaggcggtgttgaccatcgttcacattacttaccatgacgaaaccaatatcggttcctgcccgatcggtcagacaggcggctttgaaaacgccgacggaaacggagaaattcactgttttcggatttttgacggcgtgagcgtgatgctgatgcagctggaaatgggatcgtatacggagatccgcacacaggtcggcgtgctggaggtcaatttctgcatcaacggccgctttgaaaccagcttttccatgcgtgaccgcgtcctgctgaagccgggggacatggctattagctgctacgacggcgttcacggcagcagttcggaatcccgctttccgctgggctactacgaggggatctgtttggaggtaaacccggaggcggccagttgttggatcgcgcagcatgccccagcgtttcatgtggacttttcggcactgaaacaaaacctgcttgacagcaagtggtatatggtgggctccgcaggctcccgctgtgagcatgtgttccgggaactttatgaaagtgcatcctacgccgatcacaccgttttacagctgaaggtgctggaattgctcctgcttctggaacgtattccccaggaatcagggatggattcctattactctgcggaacagaccttgttggcgcaccacctgcgggatcatctgctgacgaaccgggagggatgtgtgtcccttgcccagctggcggcagagcacgcgatttccgtgtcgcacctgcaaaagctgttcaagcagacctatggtatgcctgtctaccattacatcaaggaataccgtctggagcaagcagcggtggagctggttcgtagcaggaagcctattacagagatcgcccagcacgcaggatatgacaacgccagcaaattttcggagagctttaaaaagcggtacgggaagacaccgtcccgctatcgcgctgataaaacgaatgcagtaaaacggagcatagaaaccaaaacggagtagtttgaaaacgcgaatcatgttagaatacgcggtggttagaggacactaactaagaagtttcaggaggtactgtatgaaaaagaaatttgctgcttttgtgctttgcgtgatctgcctgctgtcggctgccggctgcggccagacgaaaacagatgaacagacgccgccggcggctgaccagagcacgacgaccgacgattatctgaccggcatcggcggcacttatgtggagctgtttccggagctgtcaaagtccgagtatcggaatatctggatcgatgccaccgcgccgctggtaggcgcggagaacgcggaggccaccacggatctgctgctggggatgtgcatggcggagccttacggtccggaagctgcggaaaaatacgaggcagatccggacagcatggcgttcaactgctattttcttggcggcatcgacaagttcgtgatggacggtcacacgatcaccggcctggacgcacagggacaggaggttttctcccacacctataagctgctggatgagaaaaacgaaaacggcttcatcttctatcagagcgaggatgaaaattccggcgagtttacctattttgcgttttcacctgacaccatggagaccacctatcatctggagttccgctatgcagaagatctcagcgacctgcaaagctggttcgagggcaattacgcctactggaacgcagcggccatcgcggagaactatgatcaggcgaccatggaaaatgtcattgagctgttcgccacagaaaatctgtcgaatgcagaataattgctctttgcgcacccgtttggatcaagcgggtgcgcataccgcttttcaaatgaggatgtgatttaattgaaaaaacagtctgatctttcccggctgatgggttacgccgggaactaccgatatttcacctacgcttcgtgggtgttgtccggggccagtgcgctggtggcgctggtgccttttgtgtacatctggaagatcctgcgggatgtgctggacgcagcgccaaactatgcgcaggcggtgaacatcccccattacggctggatggcagtgttattcgcggtgctgtcttaccttatttacgttgcggcgctgatgtgctcccatctgtcggcgttccgggtggcgacgaatctgcggctggcagtgtcggagcatctggcagtgctgccgctgggctttgccgagaccttcggcagcggtaagctgcgcaagatcatccacgagagcaccggagccgccgagacatatcttgcccaccagctgcccgaccagtacaatgccatcgccaccccggtggggctgctggtgctgctgttggcgttcgactggaggttggggctgctgagccttgcgccggtggtgctggctttcctcattatggcgactatgaccggcaagcggatggtcgaaaaaatgcggcagtacggcaacgccttggaggccatgtccaacgaggcagtggaatacgtccggggcattccagtggtcaagaccttcgggcagagtgtgttttccttcaaaaagttcaaggccaccattgatgagtacgaaaagtgggtcatctcctacaccaaagacctgcgcctgcccatgatgttctacaccgccgcagtcaacggcgtgttcgcctttctgattgcgggcggactgctgttcacgacacacggcgtgacaccggaattcctgctgaatctgctgttctatatcatcattacgccggtgatctccctgacgctgacgaagatcatgtacatgagcgaaaacaagatggtggtggccgatgccctgcagcggatcgattccgtgctggatgcagcgcctgtgccggtgagcagcaagccccagcacccgcaggacggctccgtgacgctgcgggatgtgcatttcagctatgacggcaagacggatgttatcaggggcgtttccatggacatccagccgggacagactgtggcttttgtaggtccctccggcggcggaaaatctacgctggcaaacctgatctgccggttctttgatgtgcagagcggcagcgtccgggtgggcggagcggatgtgcgggcaatccccaaggaagagctgatggataccatctcctttgtgttccagaacagccgccttctcaagggcagcattctggataacgtccgtctgggcagaccgcaggccaccgaagccgaggtgctggcagcgttgaaagcggcgcagtgcatggatattatagaaaagttcccggcgggtatccataccgtcattggcaccaagggcgtgtatctgtccggcggcgagcagcagcgcattgccattgcacgcgccatgctgaaaaatgcgcccatcctgattctggacgaggccaccgcttttgccgacccggacaatgaagctaaggtgcaggcagcctttgcccggcttgccaagggcaaaaccgtgctgatgatcgcacaccgcctgtctaccgtagccaacgccgactgcatctatgtggtgcaggatgggcaaattgcagaattcggcacaaaggacgaactgtgcgcgaaaaacggtctgtttgcccggatgtggcaggagtatcaggcatcggtgcagtggaaggttgcaaaggagggataaaggatgatcggaaaaattcaacacgccacagccagctccccggagggcgcaaaagggcttgtaaagggcgttctggcctgtgcgttccaaaacatggcattcatgttgcccaccgggctgctgtatctcttggtaaaagatctgctggcaggctccacgagcgggagaaaaggtttttatctgctggggtgtgcggcctgctttgcgctgatcctgctgaccacatggttccagtacaatggcacctattttacgacctataaagagagcggtacccgccgcctgacccttgcggaacgactgcgcaagctgcccctgtcctttttcggcaagcgggaccttgccgacctgaccagcaccatcatggcagactgcgaggtgttggaaaaggactgctcccacttcatccccggtctattcggttccctcatctccacggtgctcattgctctgagcctgttcgcctttgacggacggatggctttggcagcattgtgggtcatcccggtatccgttgccatcgtggtgggcagctaccgggtgcaggacaaggtgcaggccaagaccatggcggcgaaaatggcctgtgcggacggcattcaggagtacatcgagactctccgggacctgaaagccagcaatgcggagcagcgttatctgtccggtctttccggcaaaattcgggctgtggaaaagcagtccatcgcagcagaactggaaacagcgctgtttgtgtcctctgcgagcatggtgctcaagctgggcattgcatcggtggcactcaccggctcggtgctgctggtgcagggcagtatcgatgtgctgaccctgtttctgttcctgatggcggcttcccggatgtatgaccctatgcagggcgcgttgcagaatctggcggcggtcattgccatgcgcaccaatgtggggcggatgaacgagattctggacgctcccttgcagaccggcagcgagcagctgaccaatcagggctgcgatatcgtgttcgaccatgtgggctttgcctacaactccggcgaaacggtgctgcgggatgtctcctttaccgcaaagcagggcgaggtcacggcactggtgggtccctccggcggcggcaagactaccgtttcccggctggcggcacggttctgggactaccagaagggcagcattaccgtgggcggcatggaggtttcccgaatcgacccggaaaagctcatgagcctgtattccatcgtgtttcaggatgtgactctttttgacaatacgatactggaaaatatccgtctggggcgcaaaggtgccaccgacgaggaggttcttgcggcggcaaagctggcaaactgcgaggaatttgccgaaaagctgccggacatgtggaacacgaacatcggcgagaatggctgcgccctttccggcggcgagcgtcagcgcatttccattgcccgcgcattcctgaaggatgcgcccatcattctgctggacgaggctaccgccagtctggacgtggagaacgaaactgccattcaggaggcactttcccggctcataaaacacaaaactgtcctcatcatcgcccatcggatgcgcaccgtagctggggcggacaaaatcgtggtgctgtccgacggcgtggtggccgaacagggcgcgcccgatgcactttatgcccggaacggccagtacacccacatggtggatctgcagaccgacagccagaactggtctatctgatccgacagaattgacagatcagttccacccatccagaatcagcagatacgcatagtaaaaagggcatctatcccagagggaatagatgtcctttttagtgtctgctaagtcccaaatgtctccatcttgtaactcggatcccaatatgttataataaaaattaaagaagctgcccaaagcaaaaagggcctgtcacaatatatgctaaaaaatgatagtgcgatttaccatcgtaatatttcttgctacatttgatgcactcatcatcgaaatcgaaaggggacattggctcaactgccaatgtccccttgttttttatttacgcagccttttgctgaaaccgctggctgcgaatactgttggcccgtacctgaagctcctgcgaaaggagcttcaagacggaaaactcatcgtccagcccgtccagttcgcgctgcagcacgccctcatagtggcgcttcttttcctccagcgcctgcaccttgagtacccaacgttccataactgcgggactctggctgctgctcttaatgaggtagtcgcacttttcctgataggccgcgatctcctttttcactgccagatagaattcctccgtcatcttatcccgctgcttggcatcgtcaatgatgtagaagctgttgaccaccagcggcgtctgctttttattcagtccgctgagcagggtgatgaagtcctcgaaaatatccacgcgctccataaaagtgcgggggacaaagtacatatggccggtgacactcagtttggttgcctccattccccgcaggaaattgacgcagatggtctcgatctgcttgcggtttgcgcatcgctggtagagctcaaaaagctcctccgcttttcggcagcagccctgcacatccaccgcatcgtccagcacgagattatcacagcggaacatcccgtcgttcttaccgcagctgatattcgccagcttttcataccggttggtttcgcggttcagggtttctttgaccagttcccgtgaaaaaatgccggcagtgcgcttattatcacggcagtaggcaagatagatattcgtctcgccgtctaccgtgaccggaacacgctcccggatatcgcctgtggcggagcggaacgcatcgccgagagaaagccgggtgctgccggtgtagggaatgcccatgctctcgcacagcgaggacagttcatccttatccaccagcagatttgcaagagaaaagtataagaactttccaagcatatgctcctgatcgccctgcgccgcaccgagaaactgattcatgttgatgatcttttcttccatattgttgtccttcctttgttacatggttgccgcctgactgagaaggtagtcgtccactcccttataggcgggattccatgtgtattttgaatagcgaatacctgggatctttcgcacttccttccgcatggtgagaatggcgctgcgcacatttggattggtcatctgatccatgtccatcgcctctatgacttcgcggacgccaagatctcggatggtatcattcaagccattcagcgcgttgacgccgccgatgcagataaagagcgcatcttgcgcaaggaaactggctacatcgcccttcagcggaccttccgtcagaaacgcacgcttgctttgggtgttccctgtcacatgcacccacgaatagctgcgggtgccggatggcagatttcggctggaaagccagcggtatttgcgattggcctgctgcgcatcgtccagacggatcttcagcccttgaatcagcccatccttgttccgaaccggaatcaggaaaccgttggggccggagagtgtccagtcgccataataggtgcgaaagcccggaataccgtgcaggtcatggccgtgactgcgcaggaggtcggccaaaagccgacgcccgcgctctgtttccggcatactgcggtactcgtttcttcggatgcgctcttcgctcaagccccgttctaagagattctcgccgtgttttgggagaagcgtcagatgcgccagcatatccgaatacacggcatggcgctgctccaatgagcagggctgccgttcctgtgtttggggagatggtgattgaggcaaggggtagaccttgctctcatgcgccagctccagataagcctctttgttacagatccctttgatccgtgcatacaggctcacgctgtttccgtgtgcgccgcagagattgcagcggtattggtcggtatccgtattaaggcttaaatgatatttccccggcccgtggtcaccgcagaaggggcagcttgcctcgacttcctttcgccgcagcgtccgggagtcgagaacaagcccacaccgtctggccgtgtccacaatggggatcttatcgtaaatttttgcggccaaacggtttcacctccgtcatgcagctctctgctccgcaaaggcaatgggtcttacgggttttacctgcagcgccgcgccgctgacacattttgccataataatctgtccggtgggccttacattggcaaggtcatctaccgactccatgttatcgacaaacacggggtaattccgcccggtcaaccgcttcatcagctcagagacctccatgccggcccggatcttctccgaaagagagagtcggtcgtaacggcggccgccatactggaatttgaaggtgtctttgacttccccggtggatttcaccacatcgtagagcgagatctccacgcgattcattttaagctgcgagaaggtcagctctgcccgcttgctgatgtacgcgatcacatcggccattttgcgcttgatctccgcaatgttggcattggcctgcgcgatctcgcggtcaaaatcaggaagctgcgccgccgtcatagtctgaagcgccgctattttcgcttcgctttgccgcagttcctcccggcatgtaccgaggcggtcgtattccgcctgtgaaagattgccgtactccagatcagcagtcagcgtctggatctctgcgcgcaggcgctccgtttctgcggaagcctgctccgcaagcgaggcacagcgctgctccatttccgcagcttccgcggcccatttgccaaggtcatcttctttgaaccgtgcgaaggtatccgcagcctttttgtccatctcctgaagctctattagctgagcgcgctgttcgctgccggcagcataaagctcggagagcacttttttcagcgccgcctgcacttcggacaagctctgctctgtcacgctccggtgacaggcaggacactccataccggcgtgaaacgccttatatgcagcgttttcccgctgataccgcacacccaggtctttgactctggcagacgcttccgccaacgcttccgtgaatttggactggtacttctccacttctctgcgggcgatcttttcccgcaaggtctgaagctgttcccgcaatttggaagtatcggtgcgttcatccctggcagcttcctcatatcgtccgctcagttctacaagccgctcctgcatgtcacttacatccatgccggaaaactgcctttgctccagttccgcgatttcctcgcgaagggtgtccacctgcaaggtcagctcctgctcggcctgctcatgggattccccctgcgacgccgccaagtccttctggcctctcagataggtaatgcgttcctccagaccccggatctcctcccggcagcgcttgagactgccctccggcgagagaatcgtctcgtttttgagatgttcccgcacgggctcagataactgagagagtaccgtttcatgagggatcgtgggaagataccgctctaaaagctttttcccatcctctcccaactcctcgataaagtacaagggattgaagatggataagaacacatcccgctctccaaagagatctgccagatccaactgccggatctcatagccatcataggtgatggtcatgcggtttttcctgcgggtgcgattgagctcatggagcgtgcctgtttcgtccacaaagcacatccgaatggcgacatcggggttattctcattgtgcaggcggtcaattccacgctctccaaagaagggacagccggtaacggcaaaggcgatggcgtctgcaatgctgcttttccctcgcccgtttccgcctgtgatgaccgtggggttgccgaacaccagctctgtcggctcctcataggacttgaagcccgaaagcatcaggctggtaatttgaaactgcttgatctttttcaaagaattgctcctttccatttttcgctgaatcgctgtttacgccgccctgtcctcttgcgggacgatctcgtaggattccagcacgtaaaatgccacggtatcctgctgacgcatggtgagctttacattgctcagaacggtgcctgtgctcagttcgggccgtgcgccgcgggcgaaggccgggatctgcttgccgtccggcgctcggagcgtaacaagcgtgctgctgccgctcataccgccctgtaccttggtgtttagaaccacatagcagtctgttctctgccgcgctgcgctctgcggcggggtaaaggagactgtgcgggaaaccgccgctctgctttgcggtgcggacggagtctgctgtgaatcgctccgtgtcgcaggctggtctgctctttgcagagccgatgcaggcgcgggctgggaatttccctgctttggctgcggacttgctgcaggcgcgttttcctccggtgctgtctgccccggtagggttttcggcgtcagcagcgattgaatgccgcaggccgcggccggtgtcagccccaggcgcttcagtgcgctcagataagcgtgatccagcttggcgcgttcgctgtccttgatcacaaagctgcgcccgcgcttctcaatctcgacccagacggtattaaggtcgtacagcacgcggccgatcccccattggacggcagcgcgcttcatactgtcggatagaccgcccttgacagactcgatatccgaatcttcggcgccgtcccacttggtaatgaagccgcggccttcaaagtagatggcgatgccgcaaagctgcgcctcctttttcccgttgctgtgccagggcttgaagtcgttataccagttctccggcccgcagacctcatccaagcggttctggatggcgcggtttgtcacatagggaacggctaggccgcgcatcttctcttccgtcgtgttctgcagccgccattccagatcctccggggcgaagggctttgcgagagcctgctgcatttcttttgggttaagctgtgccatgatgctacctcctgctgataaaatctcccagtgtttttccgttggataccaggatgtccgtgtagtaatatgtaggatttttgtccttgagatgctccagaagctctccgtgcgaaagctttaatctgttatgctccctgtcatacatatcgtcgttgtcaggtagacccagcagataccgtggaaagttcttcagcgcggaaatctttcgataccgaggcagcacattgttgcccgtgcagacccgatcatccgaatggacattggaaaaggggtaaaagaacatcggcgtatccatagttggcgcttcatccgcaacgacgcccatggaacactccgcgactttgccgttttccagaacccgcacgccaaacaccatgcggggaatcggaaaatttgggtattccctgtccccatagatcacatctgcccgcagttccggattccaaagtacgaaatacttctccgtggcggacatggataggtgaaggcagtgttccggaagaaagccgctgtccagataatcattgctggcatagctctggttgataacatagtacagctccagaggatcaatttccctgtaggcggcaatgccgcccggtttttgctcctctacaatgatcgtatttctggtaggagataaccgcagaatgacatctctcgaataatccttgttttcagccggctgcatcaggcagcctcctttcttatgttttccgtttctctctcagcaagttttgcctctattcgccggatgctgcattggcagtaacgaagcagatccaccagcgaatttgcaaaatagagcggctcgtagtaatccggcgacaggcaaaattccagaatgacatgatctccggcgatatgctgtgagaatttgtaaacggagtttgttgcccccagcacgaaatactcagtaatatcatgcagctttttactccatacgctttgcctgcttccgtgcttcggatcagaagcgcgcccctgctcatacagccggtcgatgattggatgggagcattgcacgacggtcgcttcatactcttcatcaaagaaaaagttcacatcgtcaaaaatatcccacataacttcatcgatcaccatgagaagctcctccatatcaacgacagggtggctttggcaaaagatgtgtgcggcatccggagactgcatatgcaggaatttaatcatacgcagaagcagcaggatatcgtcttcatactcaattccatacataaccggcacctcaaaagaaagaacgctcttgccgctggaaaacaggagctttccgacagtagtggataaagccctgtatccaaccatcgaagacccgatgatagacccactcataattttcgggcgttacattctctatttggaacgcatcccaatcaatgatagaaaggtcaatggtttcttctttatcaaaggcttccagcagcttttggatatatgggctgcgctctgatttggggaaaaacgccgcgtcgtctttttgcgggacagaaagcagcatttttacgaaaacattccgatcaaatgcagtcatcttttttccacctccgggctgagccgcacgacgcaaagggcatatccggcggggtttgccagaatcgcccgctgttcctcttgagatgcgactgcacgcccgagggcggcatagtagatcccgcagtctgggagcggtgcgcctttttgcagcgaaatgtgccacagcgcgtgaatcatcagctccggatcgctgccatcgaccactacggggcagataagcgaatcgcccgctttctgcgccttgtccatatccacctttttgatcatggcggctgcatgaaatgcagcggcctcctgctgtgtctgctgcccggccaggaagagcgttaagaacagctccggctcctgacagcccagcaccacactgaaaggactggtgagttcatggccccatgcgtcatttgcgggatagaactgacgatacagctttcccagggcaggcatcagcagattggatacctgtccccaaacctgcgcgctgagcgcggccttgctgccggtgaactgatctaccgggacaacaactgccatgttgcaaaacttcattctcattcacctcaatattcttccggcagcaggatcgtcgttgcagagcgatccgcttccgtgatgatcataatgcgaagctctttggatacctgataccatgaaataatccggttcccgctgcgaagcgcctcctcattggctcttgcgtcgctctcacaggtatcaccccaatcgccgctcagatggcgttccaaaagctgggtaagccctgctcttccgaccttatccaatgccgcaggcgtcgcacagagctgaccgcagcgaaaacgcgcttttttgtcttgcataaattccgcctcttttcatgtcaatgccttaaagccgtttggcgtcaggacattgaaaatcattttgtttgtaatggtttctttcacttcgctgccaatgtgattgccctgcgcgctgaacttttcctcgctctctgtgcggatgaccttgacgatgcggcctttgatgatgtgcggcgtatcgcacgctatgaggccgttgatcataccggagccgccgatcagtccgatctgactgatggagagcgggagcagcggccgctttacgccgctgtccagttcgctgcgcgccatcatctgcgcaaagctgttgcagcgccgaagctgctgctccaattccttctggttgaaccgctcacccttaaaggtgttgacctctatcgtgtgatccggcagagcgtagcgttcttccggcatctctgcaagagagcggatggcatcgggcgcagacgcaagctcctccagccagagggtatcctgcagttctgccccccggggctttcggacacccagcaccgctacctgcttgaatttccgaaattcactctcggtaaagcgccagacggtaagatcatcaaaattgtccacaaggatgcggcagatatccggtgtcaaacggtaatagggaatcacatagatcagtaggccgccgtatgccaacgcaggcaggctttcaatcagaaatcgcttttcatgccgggagcgtccgccgctctcattgatgaccgagagatacggcgggttaagaaacagcagatggaaggcttcccggctgatgctgctatgaaagaagctgccgaagcccacgcggtgaagccttgtctgtgcttcctccgcgcggctctcgtccagctccacgccataggcatagcagttattgccctgcgccagttgtcgaagcgccttgccgcagccgcagcagggatccaacaagttcgtggtcacgccttccggaaatcggatcccccgcaaaagaagagcgatattatccgggtctgttgggtaatagcccagcttaatgttgttcatcagccgacctaccaccgcagcattggtcttttgtcccacaggaagggatgacgcgaagcggctcagcgcctcgtagacgctcttatagccggtgctcatcaatgcaaatcctgcaaggccctgccgaagctgtccggatactttcgcaagtgcgtattcctccatttccatgaggaaaagctgcacctgtgcgagtgtttccaccaaggtttcccgcgttctactcagttccgcgtaaatatcccgtgccgcagcaaggtcgctttggcggcagcgctcaatcctcgcccgctgcaaaaccatgcttttggagagctggatgatcttgccttgaagctgcgcaagctgatccagagcatacggcttttgcgtggaaaggtcaggcagctcgctcataacggcacccatccttccgcaaggcactcagcgtctccaaaagctgcggatatgaccaggttttcaggtcgctgctggtgagaaaatgattgtatccgcctttgaagtccctgctgcttcggatcgtccgatagcaaagcaccttcccatccgcgcataagcgctgctcgatccacaccgcaatgcctctgtcctcccacattccataaagggagcatgttcccgacaccgcgatgccgccgctgtttgcactgactgtaacctcgtgcagtccaagatccttggcaagggcgcggaggaatacctttcccacattcaaaaaagctttcttacttccattgggtccgctttccctctcgtcaaagatgcaacctaaatcagtggtcagcagcagcgcaagctgccgcatgtgaccttcctgcgatttgatagacatgttgtatcctcctttatttccggataaaagagggcaaggaacacgatctgttccttgccttccgttcgggcggctcacgccgctcccttccattctttttcgtgtctcgccgcccgcagttccatctgcatacgggcaaggggaatccgccgctcataatatgccagcaggcgcagtccgccgccttgcgtcggaacaccgcgatagatcttttcatagagcacagtgcgaccgtgttcctctacgcgggttctgctttccactttcacttcacacataggcagttaagctgcggggcgaaggatgcgctcgttttcgaaatcgaaaacaggcgcgttttcctccggtgtcccgggaatcagcttgagggtataaccctgctcgcgtgagagcttaaagagcccaacgatacggttgagttcctcatccactacatcttcctgcttttcttcgacttccggcacactctgatcagatgcagagaactccgcgctcccttcattctgcacagtttccgtgtggtcttcctgcgcaggtacaaattcagcgtccagaacttcggctttctgcccgggtaccgtcagcgccgtccagaacgagcgcagcatggaggcaaagagtgtaccgaagagggtgcgctttttcggcgtgagattcacgacctcctgcgccacgacctcatccacctcactgatcgctgtcgtcagctttcccgtttccacataggctgcggaaaggaagcaggatacggcggcactctcggaggcaaacacctccggtgcctgcacacgcttggcgatcaggcgcttgcagatcacggtgccgctttctacatcgtcgatgcagacagtatccgcgttgatgctgccggcgtcgatcacgccgcttccggtgatgctctgcgccttgacgccataggtcacatgaaggcggccatgcaccaccagatgctccgttgccagagactcataatggacagtttctcccttgggaatgtaaacggttttcatcttgtattctcctttttcttttttagatggctatgccatctttttttcttttcaagctgccatttcctctttcagccggaccggcaccaccagggcaaaatcactgcgccccgcagcatcgatcacgatgggagcatgaggactgctgagatggatgcaaacctccgcttctcccttaaactgcttcagggcatccagcatatggtagagatcaaagccgagaaccatgtctccgcggcccctcacctcaatgccggtttcaaatgctccgccgggcgccgcaatggaaagctgttcgcccgcaaagcgcacatagggctttgccgtgagcgcagagcattccttcaggtaattcagttcccgcacaaaatcagccgttttgactgtcacgctctcccgataccctttagggatcactgcatccacgttataggtatccacgccctgtaagcgggcaagcatacgcaaattgccgcttgcaaacagcacatggctgcttccgatccgcacggtcatatcttccttgccgaaagcgctcaggtgcgcaagcacatcggcgcgcaccaaaaaaggctttgggaaagaaacaccttccagcgtatcgcaggcaaggcgggttccatccagtgcatagatacgattcccgcaaaactgcacgcagatcgcagcgggtcttgcactcacgcttggcttttccgcagcatagcgcacacgctccacacaggcggaaagcctcgcgctgcttactgaaaatgcatcgccctccgaagcctgcggcgtattcggataatccgctccgtcgtagacctcaaattccgcaccgcggcgttcacagcggagcagaacctttccggcttttttgctgccgctccgcgtttcggaaaattccatcgtcagctcaccggcaaagtgggaacaggcgcgcaggatgtctttggtttttcggaaaacaaagaacatatcatcgcccgaagccgggagctctgctgtaagccatgtttcgagatctgttgccgtcaatgtgcagcgcccattctgaatccggagacagacctcctccagaatgggtattgcgcactttttgaggattttactgattttgctcattgcatgggaaaactcttttgcgtcaactactgcacgactcatgccgcacgcctccttgtcttcttttccagcactgtctgcatccggatcgttcgggtggaaaaatccgtctgcatggcattgttttctccatgtgtcagaatgttatagaccatgatgagcacagcggtcgccgcagtcacattggccacaatactctgcggatcttcctgtgcggcttccgcgcagctgatctccgaagggaacaggtcggtgtccttcagcatttcgggatgaacgccgccaatggatttgcggatcgttcttccgttccttcgcacgccgcacacgacctgcccggtgtactttccgttgccgctgtcgatgtagatgagttcctcgctctgatgaaaagcctgatggcagagctgccgcgtcttattgttatccacgcagcccagcagcagtaccatttccttcgtccgcttggtagaatagggattcagctcccattccttcggctcgatcagttccatcagatccggcagcttttcaatgaagtttggaacatactctgtctccattccaagcacagtggaataccgctctgccagcacgcgggctttattttcacccaagtctgcggggacaaagttctgccggtccaggttctttggctcgacaatatccccatcgcagacaacaaagcgggcaggacgatccagcatatgaagcaggcgaaacacatacggggcaacatagcctcctgtgccgccggcccccagcatgaccaccttgaccgggcgatccgttggaaacttcataggaacgcctcctccagaaggtcccggaagctgcgcttatccggctttttgaatcgttcgggctttctgctgcggatgcttacctgcgccagccattccttgggaaacggctgctccaatccttccatcacaatatttggatcgatggatacaaaggagtcgccgcagaaaatacgcgccttgacgtccggatagaatttatcaagttttcccaaaacgaggtagagtcctgtggagcgctcatcctgatcatctttgccggagaaaaaggcatccatgctgttatgagagtggatatccgcgtagcagagataccgctcttcatcgtcataggggcagtcatggagatcggcctctacttcctccttgcacacgctctgcttggggacgtaggcaaaaaagcgtttttccgccttgtcccagtaaatctgggcaaatgcttcattctccccatgatccgtcataaaggcacggaaaaaggcgatgatctgtcccatcagctcggcggggatcttcggcagagccggggaaaacccggctctgacctcagagaaatccaccacattctttttgggggcgataaactcgccctgctccatcttgcgaagctcatagatcctgccgtcgttggaggggatcaggcagataaccttatccgagttgcgagcctcttccaaggtgccgaatttccccttataagcggcatttcccttggttttcatttccaccttgggctttacatagcagcaaggatctttgtccttcgttttcttgagggcgtcgagaaattcgcgagagcgttcgatcatctccttcatggaaatgatcgtggtccccttggggtctttgacctccttgcggatgccgcagtattccacgctccaggatacccttttgccttcctccagatcggtaaaatcatcggacttgcggatacgcagttcctcaaaggtcatggaaggatcgtcaatctcctctttcacgcccttgtggtaaaataccggaggcttttccaacaggccctttttggtattctccgctgttttctgctcaaaggccgcggcaatgggattctccgcaggagcttcggctggcgccttggcaggcgtattaacgatgggtgcggttgtcggctgcaatgttgcagcaactgccggtgtgatttcctgcgccacgggtgtcggagacgacggaacgctctgtgctgccgccggaggcgcaaacgggtctccctgcggcacagcgctgctgtttccaaaaatcgcgctgatgtccaatccctcttcttctgggatctcctgaaagggccacgcgccgttgctgggttcactcatagtaaattactcctttcgatttggggacaaaaaaagaccgcaatcactcctatgagcaattacggtttcgttctcgtccttattacatttcaagtcgtttgggttcgacggtactcgcaaggagcatgccacatctctaagcggtaaaaccgccatgagctgtgcaaagggcatactacctcctttccactctttctttcctaacttactccgccctaacttacttcgccctgaaatacagcttcattgtagcattacggggaaagactgtatagttggagtttttccatagtaaagagaacgctctggatagtatattttcaccaagcccctttgctcagaatagccttgattgcagcttcgttccattccgtgttcgtaaagtcggcagactccaccagcgccttgacgacctgaacgggatccgccttatggtctgtagccgttgtcctccgcctgcatcacgggatcgtccacctccgcgccggggatatacagccatgccacggtgtcgggattcttcgctctggcttccgccaactctgcctgcctgtccaccgaggggataacttcgcccgcgggagtcgctgatggctgaggcgcagatgtgccggaaggcgttctgccggaaatgtcgataggctccgtctctttctgatagcagcccatgactgccgtggtcatggcaaagagaaggacggccatgcagatgatcggacgaatgattcttgtgattcttttcataatgctgtctccttgccgcactgggatagcggcgcagctcaaaatgtcattgatttgtttcttgtagcgaaaagataacagcgcagcttcggggcgagctgcccgtccgctgcgctgtccgatgtccgcttatggggtcatgtcagcggctttgatgtttagccgtatgtcagccggtcacttcttgcagcgccagaggaaggtcacgatctgactgcgagtgcagtcgttgtcggagccaaacagtccgccgccgatgccggtggtgatgcccttcttcgctgcccatgccactgcgtctgcatagaaggccgtggtggaaacatcgctgaactcggcgctgccgctgactgcggggctgccggaggtacgatagaggaaggtcacgctctgcgcacgggtgcagatagcgttggggctgaacttgccctcgcctgtgccgctggtaatgccgttttcgacagcccatgcaacagccttggcatagaaggcgtcagcgggaacatccgtgaagctgctcatgctcttgggggcgggagaaccggcagctcgccacaggaaggtcacgatctgcgcacgggtgcagggccgattcggtccaaacaggccattgccgatgccgccggtgatgcccttttcctgcgcccatttcacggcctcgtagtaataggcgctggtggacacatcgctgaacgggcttggctcagcttctttggtaaaagtggcgttgatcttggccttgccggacggcatagtgaaggtatatttgccgttgcccttatcagtcagcttcagttccttaccgtttttgtcggtcacggcgaggtcatccaactgataaccgctgtcgggtttcaccgtgatggtcacagtatcgcccttttccgcggaacgcgggctgacggtcacggtgccattctcggtcttgccggggacggtgataggataactggacgagccaccggagccgccgccggaagaatgccgcttgggaatcaccgtttgggcttgagtgatctcatttttggcatctgcatcggagaagtatttttcacaggcttcgcagtaccagtattcaatgttgccttcttcactggtggtagcgtccttggccaccacatgtttcagcttgtcgccatgatgattgggattggtatcgccgtattccgcaccacaatcggcacacttggcctttgccttgcaggtcgctttgccgccggagtgttccgccttattaaacaccgcgccgcaggtgcagacctgccagtgttccgtttcgttggatttccagtcgttgctctggtggtcatgggcgtcgccctgtccattgaacaccggcagggtcttgcccgccgtatccagatacttgcattcgtctgcccaagggtcagttccggtgcgtgcgccagccttgagcagcgccagcaccgtactattggcaaactgcgcggcggtcttggactctgtatttgtgatggagccttttccattgcccaccgcgttccatcccgtaccatccagatagtagcagttgctcacggtggaagggttcccgttctcgtcgcccgcgttggacccccccgcgatctcgccattgtaattccaactgcctgccaccttaccggcattatagcagttggagactgcgctgtcatcgctatatcccacaacaccgcctgtcatattccattcacggtactcgactaccgtaattgttccggtattgtagcagtcgcggatcacggaacctttatccatagcgccggcgattccgccaacgtaagagggaccttctgtgtcagctaatgtgctctttactgtgcagtaattggcgcagttttcgatagtcccgtcagagaggtagcctacaatgccgcccagatttccggcgaaaccgaacacatatccggtgactgttacattccggatcaccgcttttttcgcggtgctgaacaagcccagacagactgcgtcgccgatagacgttgcgttgtttatagacacatacaatcccttgatggtatggccctgtccgtcaaaggtaccggtgtaatacagggttgtgtgttcgttgaaaagtccggaatacgcgatgggcgtccatttttccgcggccttaccgctggcaccgggggtataggttccgttctcgtcaaacgtaccgtcgttgaggacgatgtcgttcatcagcttggcgtgggcaccagcgttctgtgtctggccgcccgtaccgttgacaatatcccgaaaccgctttaactgggcggcagtgctgatctgataggggtcgctctccgtgccgctgccggttataggggtattaaatgtgccgtcgttgatggtaccgttgttggtcacctcgccgttgaatgtgccgtcgttgatggtaccgttgttgtttaccgtgccgttgaatgtgccgccggtgatggttccgttgttgatgacctcgccgttgaatgtgccgcttccgatggtgctgccgggggtaacggtcaccttgccgttgaactccgtcttgccagtgcctgtaatggtaccgggaccgactgttgtgtctgttgtgtctcccagcacgacgtcgccgtcaaccgagccgccgttggcgaaaagtttcccatagccaggtagctgagagccggtgatgtatagtccgcttccgtttgtcgcaatacagccggcaatgctcgcgttgtcctccaaggtgatctccctcacacaagcggcgctcacgccgccgccataggctttgccgggggtggcagaattttttgccgtgcaattttgaatcacggcgctgcccgacagggtgaactccgtattgtttgcgagaaaaacgcccccgcccttggaagagtcggaagatttggagattgcctgacagttttcgatttttgcattctcagacattacaaagctacggctgctgttgacaaatacgcctccgccgtaggcagatgtggagattgcctgacagccttcgatttttgcctcaccagacatttcaaagctaccgtcgacatatacgcctccgccttgaatgagttggtccgtgctttcgacggtgcagctgcgaatgaccgccggacctgacatttggaacttgccggaagcataaacaccgccgccgctattggaggcgacgcatccggcgatgctgccgccggacatagagaactgaatctgttcgccgttttgcctcggataaatacatacaccgccgccgagctctgcggagcagccgataatattgccgccgatcatggtcaactgcccgccgggtgcgatatacacaccgccgccacaatttactgtgatgctgagcggaaacggataacccgtgccgccggtgatgacgccgccggtgacggtctctgtgccgcttgcctcgtccagcacccacaggccgttggtgtcgggcgtgaacttgtgtactgcggtggtgttgctgtcagtcagcgtcagattgccgctgccctcgaccacaatcacgctgcctttgtttgcgctctcatatttgagcacatgaccgttcaggtccagcgtcacgatgcggttgacggtcagggagttgctgatgctaatgtcccctgtcagcttgacggtgatgacattagaatcagcaatagccgcagtcagctcatccgcggtgctgacttctgttaccgtctcgcttccgccaattaacgccgtcaaggctgtcttcggctgggggtcggacacttccccctccggctgcactgccgcatcgtctgcgggcttgatgtattttgcgcaattctccgccgaagcaccctctgcgccgcagacggggcactctgcgttcctgctttccgccgtgcaggctgtttcacagctgcacacgggcggggtttccgtgctttcctccgcaaaagccgttgttggcagcagtgtcagcaccatacagcacatgagcaggatgctgagcagtcgttttttcatggtcattcctcgctttcttctcgcgccgtcccgtcccccgtgggaagcgcgttttggagcaagaggggattgcatcgggatatatcccgatgcaagggagtactcccttgcaatacatattggcttctatttttgtgctggcagcgtgatccccgcaagggaaaactcaaagcgcatcgccagcgcacggaacagcgcctgcatcacctgttcggagatcgtgcggatatccagcccttccacgaaccggatcgcctgttccgtttcctccttcgggacgttgtacgcccgcagactcatggtgagaaacagccgcagcttcttttccagcgtcagctcctcgtcgcaggggtgggccatgtagccgcgcatgatgctggctgagccgatctccatgtcataaaaatcgcggacggtcagctccggctgatacggaccgaagatctgatacagctccttcgccgtttcccggaagataaattcagacgcttccttctgcgtgtaggcttcaatgtagatctcccgcaggttttcgttcagctccgtcagcgtcatctggattgccgtttcgaccgcgtagacatagatcggcggcagcttcgcacccgccgcgcttcgcgccatagcgaactggttttcaaacatgaactccaccagctccgtcaatacgccgtccttggcgcgaaaaatgttctggaactggctgaaagacacaccggccttttcgttgatttccgccagcgtggtctgcttgtagcccttttccaaaaacagcttcacgcaaacggtcagaatccgcttcttcgtaggcaaacttgcgcttgtgatggctatgaggatcacttcctttccgacgtggtgtaaacaccattagtatagcatatcgcagaaccaaacgcaacaggaacaagtaacttgtgcgctgcttttttatgaacggtttgcaatgcagaccgttcttttttcgtcctgcaaaacaattttccgaaaatctggccaaaacgccctgttcggattgtagtatgggtagaggggaaaatacggggtacgaagtagtcagcaagcacagcaagcgagtacccgcttgcggattttgcgctgttcaggtcccctgcccgaacagtcaaaattgcttgctggggcgcgggtctccggtggagacctcaaagcgtgaagcgctttgaagcgccgaccgagccggcaggcgagacgtcccagacccttatgagaaacggaggctgcccatggcgaaccgaaagcgaaatattcagatgaagttctatgtgacggaggaggaaaaacggctcatagatgaaaagatggcgcagctccccacacggcggtatggcgcgtatctgcggaagatggcgatagacgggtatacccggataattcccatgtgggcatcgttggcggcaggaacgcaaacggagaattgctaatcattcactgcgccagcggctataacaatgtggtcgtgaccaggctggggggctttacctctatcggacgaccgcaatactacgccgaagcaggccacagttgacagtttccgactccctccgttataatgcggtcatactacaaatgagaaggagagcgatttccatgaacaaaactgaactgatcgccgccatggtggaagccagcggcctgacgaagaaggactgcgaagtggcccttgccgctttcactggcacggtggaaactgccatgaagggcggagataaggtacagctggtgggttttggcagcttcgaggccaaagagcgtcccgcccgtgttggccgcaatccccgtaccggcgagcccatgacctaccctgcctgcaaggtgccggttttcaagcccggcaaggccctcaaagacgccatacgataaaacagcatagcatacagtaagcccctgcgccctctttttttgaatagatggcgcaggggctttttgtactgcgataaggcgcgtctgcctgtgcgtttgcgcgggtggacgcgctttcctttttttactcaaaagaaacagcggcagccggaagctcccggctgtcgctatagaagtagttttacatggaatccatgaggatcagtagcgagttgtgctgtgcttctgtgaggcagttccatttatccaacattttacgctgcgaaggtgtcaggacaacgctttcttctccgtctgcaaagaattgcgaaagtgtgatgccaaaggcgtcgcatatcttctccaacgatgcaaatgacggtgtcatgtctttcttataccatgaagaaatcgtggattgcggcaagccggaacgctcagcaagctgatactcagaccagccccgcgcttcgcgctgcgttttgataattccaagaatatctgtcattttctcaccgccaacgatttttcgtatattatactgtgaaaaatcgttgcattttaatagttattatcgtagtatttaattcgacaatagcaatcaacggcgagaaaaaatgcgcctcctgcgagacgcattcctgttaatctttcgatgcttctaaggcgctgcggatcatggaggacatcatggcgatttgcttgggtgtggctgtctgccacagctccaaaagtaaatccatatccgaaaattccatgctgggtaagacctccgccaaaagataggtcggagataccctgagcgcttcgcacagcaaaacgaacacttgcagactgggaaccttcgttcccgattcaatttgccgaagataggtcgcgttgatattgcacgcctcggacagacgctcactcgtccagccccgttccttgcgtgccgtattgattcgctttccgagcaacttcttatccatggtttcgcctccgattgtgtgctatcagcatttattttgtatgcttatagcttacattctcgttgacgcgaaaaatagcggctgttagaatactgattgtaagccgatagactacaataagagaaggtggaacgatgaaaaagaatgttcgctgtgcggtgatcggtcagcatcccctgcggtttccgtggggctttgacgaggaggacgacggctgccgccgcatgaagctggagatggcgcagcggatcatggaactgcgccagcgcggtgtcgcggagtttcaggtggcctgcgaccccggcgtggggctgtacgctgcagagatcatcaatattctgcgggagaaggataaatcccttcggctggtctgcgtcataccccatgaggagcagtctaccaaatggacgccgcagctccgggagcggtacttcaatatgctcgcgggatgcacggaactggactgcatcgacttccatgagcagcctgacgcccagcttttggcctatcagcggatcatcaagcaggcagccgtggtgttggctgtctatgatcccgaccttgcggatgggagcgccgaggataaggctgtgtcctatgcgcttgcactgggcagaccggtcatgctgattcatcccgaaactctgaaaacaaaatggctgaatgtgcccactgaaaaggcccccggatagactgtcccgcaaccaaaatcaccggtctcatactttggaacgatttacatttccgtcaggggtagtataataaatttgaatgattataaatcgtgtcgaaagaggtattgacaagggggcgtgcccccttgtcccgtagggttcccctacgggacaattccactctggtgcaagggagggacacgcttgcaggacaacattatcgtaaaaccgtccgttgagaagcagtttgaccgttttctgcggcagggtcgcgtgctctttttcagcgcaccctgcggctttggaaaaacggcggtggcggaggcgctactgtccagccgggaggtattgcgcctgccggcggacagtgccggctccaagctgccctctgcggaggctgactggcaaatcttactgctggacgatttgcaggatatgcaggaggagcaggactggaatgccctgtgcgaactgatccgtgcctgccccgagcgccgcttcgtcctgctctcccgcggcgcgccgccggggagtctcatggccttccaatacacgggcctgatgacggtgctggaggccgacgacctgctctttgatgcggacgatgtgcggcggctgctccggctttacggcgtggaggcggcagccagtgagatcgacggaattttgaaagaatccgtgggctatccgctgggcgtagccatcaccgcccggtgtatgtctccgggcaagccgtggacgccggagttggtggcgcgggtgttccgggaggtgtttctctactttgaaaccgccatctaccggcgctttgacctgctggtgcgccgttttctgctggagcttgcgccgtttgagagcttcgacttggaaatggcgcggatggtcagcggcgatccccgtgccggcgaacggctggacgccgtaatcggctaattaaaagtatttatttacaaaaatgcacagttcccgataagctaagaactgtgcatttcttttttcttcaattttatcacaaattccgcaaagtttgcaacacattaacaagaaattaagtaggatagaatcctgacaaaatcatctttatcgaagttgtacccatagactgtaaacccgagacttttgtggacgaactcagcataatatccactttgctcgtcactgtcaaagcggaatatatttacattttctcccgaaattgtagaggccaatggcgcactatcgttagttacttgggtattgtccgactttggtgctccgtctttgattatttctatacttactttctcattaccgatagggttggcccatatgaaattatgcccctgcatatcgcttccatcgctgaacttgaagatgccataagacccggtgttctcctcaatcatgtcggggaaaacacttgaaatatcaaattcaatcccatagtaatcaaaaagctcttcttttgtgtattcatggtagttgtcggggcccaaagcaaagaagcctgtttcgggaatttccgaggtgagttcatttattataatttctgtatcctccgtgtttgcgagagacaatgcggcacctccctccgaatttcccgaaatttcacttgaaatagcttgaccccggctgctcaacaccaccccagtaaatatagcaattattaaaacaacgccaatagccattcctatcgttttggactgtgctttcatatactacaccacctcgtttttcgttatagacacaagttctattatatcttacacgataatagacgaaaaatctaatgttttgttcctttataaatgacgaaatgtggcttgccacatcaaacagccgataaaatgacaaaacaactcggccatgcagccaaaacactccggctatccgacaaaacagcccggctttttttcgtcaaatcaggtcggctttaacaccaaatcttttgctggatcggcggaaatacctgagccgatgatggctgggcgcttatggaagatgtacagaggcgatgacaaatagaggcacaaggcgggaacatcttcaatgatgttcccgcctctactataagtgttgcgatagaaaaccatcgcctttttcgttcctctcaaccgtccaagaccgttttctgccggtagcactccgcaatataatcgcggggctgataatagaaggcagaattatagtccgaaagcagagcgtcgatccaggaggtaaagacctgcaagatggtttctacgatgttgtcctcatcggacacatcctcgatgagccttgcatagacctttcccatcgtccacacatcggggactgtatatcttgcctcggcaagattgtcaaagtctccgccttgcagtgaaaattccgtgatcacatcgtccgcgaccttttcgatcggctcacagtgcagaatgtctgcattgcggtagagcgtctgaatgccggcctcacccagttccgcagccaccttaccgcgccgcatgtgaagggagcggccaagctgttcgatcagagaacaggtgaaaaagagcgcgtcattgtttctcttgcacattggcgacatagctcctttcaaatttcagtgcagcgagagcacgtgcagtgtggaagctgatctgatgggtgggatacttgaattttgccaattcccagaaagcagctctggagatctcaccatccaaaaagctctgcacataattgaagatggtatcgtccgccatcgggccttccaccacatcatagtcatggggaactccattccggcatgccgcaataaaatccaaccattcatcgctcatttccaggaagcgcttgatgttgagctcagtctggtcatcgaaggaatagacattgacaaccccagcttttccaaagcgcgttgcccagcgcagcgcctgctgttcataggaggtgcagtaaaagccccaataaaaatccttatggaatttttgaatgcggatctcgggttgttccacaaccactctgcttccatggtaaagagtctgcataaccgtcctccttcatctttatatttcataatattatagcctgtttcctttctgtgcgcaaccaatatcatacgcgatccagtacaatttcctcgaccatctgatccccggtcagttcactggtacggtaaatattctggcaaaagggtttcaggctgaaatccatgccggcgtttccctcatccagcagaatccctgtgacggtgaagcgaagctccgattgcgccctttgcagtgtctccacacagatttctggcagcgaacactcaccgtccgtaataaatgcgatgtcagcattttcaaagccatcctcccgcatgaggcgttccgcctccgcaagcggcgtttgaaaatccgtgccgccgccaagaaaagtttccgccgcgcgcagcttctcttcaagagaaaactgcccgggaagaaatacatccgtttgaaagtggccgggaccagagaaatgaacaagagcgaatttccgcccctcgctctgcgcgatctccagcagcgtcagggcaacagcttttccccacgcggccagatctcccgcagtagagccggattcatccaggcagcatatgatatcacctgcgcccttatagaccggctcccgccgacggtattgcttgatctgccggtgctgatacttccgcaggaacaacggcagcgtttccggcacagcaagcatggcaagctcggaggttagtgcgcgagatagatcatttcccagctccaatgcatatttttctccgcggccataggcatagccattgcgcttgccctgcgcaaaaatttcccggaaacgccccagatagcgggaaatgtcctgcagcgttttactatcgcgcacacgctctaaaagcgccgcatttgcgtctgtcttccgcatatcaccgggggcgtcgctccatgcgccgaggatcgtctgtacttcttccgccctttccgcggcagcagacaccgcgcgggcgatcagtgcaccggcttctgtctgattctgcgcaaggccggcgtcaacgagcttattgaccgcatctgcctgccgccgtttgctctcggcgtcattggcggcttttaccacagcggcactcagaaccggatcgtcctgcggagccccacaaagctgctccagcagtgccgcgagcttgtcctctgcggttttctctgcttgctccagcttttccagcgtctgcacagcgccgggttttccgcccaattgggaaagtaagtcatccagttctcccgaggtctgggcagcaaactctgccgccgcttcataggccggaagctcccgtccttcacacacctccttgagcgtagggtagtcttcgctttgggtgatgtgctccagaatcggcatgttgatcttccgcgccgctactgagaggtcatcgtccgcgttgcgccggggcatcagggaataaaaggactggaaaatatcccgcgagagcgccggaaaagagcgcagcttttcgcctgcgctgttctcgatctcgtccatacccgtatcctccatgcgcagatcccggtaaatgctatcctccagtttggtcgagcgcaaaacgcggtctgtctgttgcggactacgtttcactctctgcacctgcgcccacggagaggaaagaacatcctgaactgtccggtagggcttcagcattttgtatccgcctccttctctcaaaatgtgccgaaccacgccaacagaatttttcttgcccgttccggcgaatatcgcagctccggaaattctccctgcaagtatggtacggctccgtacatatttgtttcgccgctttgacgcagctgctccagatagtcaaaatacttctggcattcattcttggaataggcgctaagaatactcgtttccatataaaacgctcccctatcaatgcgagtttgtcacttaccgtctgcaagatcgtctttggtgagttcaaagtcatccagccagtctacatcgtcccgttcgacaaaagtagatccgtcctcgtctgagtgtgcgcgatcatacgcgcgcatcagggcgaagtggttttcgtcacccaattcttctccctgtttgccgccccggaaacgatactgctggacggcgatccttgcgtcgctgcctactgcgtcccacatatcgcggaagggctggtcgtgcttcaaaagctcgcggatatcaagttcatccaaacaaccaccctccataaaggaaagctccacgccaccacggtcttcgatccgtacttccgtaaaaacaatgctcattttattttctcctcttatcttttatatggagggaggggtgatgccccccctcgcttatttggtgctcttaaaatggcatttccccggattcgccgccaaagtctggtgtaaagccgtccggcacggcaaagctgtcgggcgctccggtataggcgggaatatcatcctcctcaccgccgtctttcggcttggaatctccgaagtagacattgtctgcaatgacttcggcactgcggcgcttgccgccttccttgtccgtccagtcgcggatctggagccggccctccacgacggccatgcggccttttgtgaaatacttgctcacaaactccgccgtggcgcgccaagaaacgatatcaataaagtccgtctccttttccccgtttttggacttgaagtcccgatccaccgcgattgaaaacgaacaaacggcggtaccgctctccgtcctgcgcagttcgggatcgcgcgtgagtcttcccataagaatgatcttgttcagcatcgtgattcctccaatattctttaatttaacgctgcgatctcttccagcgtcgtataagtaaaatgtgtctgctcgtgggccttgcggctgatcttctccaaatcggccaagaggtcatccaccagcgcaatctcgctgtcagactgcgccgccgtgcgaaggctgcactgcatctgataaagatgcgtcaattcaccgcgcagcttgataaatgccttgcgcacagtatcggccttgctgccatcccccagcgcggcgtcaaattcctcctgggattccaacgccataccgcggatattgttgaccttatcctgcatggggttgacgcacaggcgggtgagcaccgcttccaccttttcacggtctgagggcaggtgccagagataattcttcagcgccagaaggtcacaggattctaccttgtcatggccggaaagccatgccttggcctgcgcgatgggataatagcccagatactttcggtccgacaccgccatatccttacgaagctcacagaggatatcgtcagccaactcgttgatggcgtcgggaacggggatcgacgcgacctcctgctgcatttgccgcaattcctccaacgtgatcgtggcggagatctgcccgaaggcaccggtttgcttattcttcaaaacggcaaggcgcgtgtcccgatcctccatattggccgtcacgaccttcagctccaggcggtcgtacagcgcttccaggatcttttcctgcgggtcattgaaattagggatctcattggaggccgcaaagaaagaaatcaccggaatgggataggtgcgtccctcgttggtgtatttccgctcattgagggcggtgagcagtgagttcagcacgccgtcgttgcacttgaaaacctcatccagcaatacgatatcggcctctggaattttgccggctgtctgcaccgcgggctcgcttttgtgaagcgccgatagcgctgcacgataaagctccagcttttcggtgccgctcttgagcttttcccatgttgcgggctcgtccttcatggagccgatgccctcgacgaggacacgcaggttgaagcgctggttttgataggtcgcgtcctgctccagcacagtttgcggcacagagcccggcagcagactcgcaagatcaacacggccgaaaagctgttcttcatcgctctgcttggaaagaagccgctcaaactgccgcgcaccggtgatgtgccggcggaacaggttgatggcatagctcttggcctgtcccggctcacccagaacaaacaggttttttcgcgtcagcagggaaatggcgatcatctccaccaattcctcccgctcagctacgctatcattggtatccgcaatgaccgccagcatcttatctctcagcgtcatttccgtgcctccttacgccgccagcgtctcttcatagaggctgctgtcctcatagagcgcgtcgatggaaatgatatggctctttcggaacgagtgcggtgtgccggtcataccgcagagccggtaggccgatttgcagctaagaagctcatacttgagctgggcgaaaatgtgctgctccaggcgtcccttttccgggtcatagcccgctacagccttgataagccgcagggcaagctgctggtacacatcgtcatattccagccgagccgctctcatgagcgggcgattctgacggatcacactgtcgatgcaccaaagattcgcttccacaatggcgttgcgctgagcgattgagtaattatttttcattgtcgtttccttcctctggtatgggcgcccaaaagcggcagtggccttggtcccagtcctccagcaacattttggtggtgtagttcacggaattatagttcttgtttctacagtactgcgtttttgccatcggtccgcgattgctcggcagatcataggaatatcggcagttactgcagctttttgcagtttccttcaatcaatttcctccctgatattcttcttggcagttttggcatcaaacgagaataaaagctcatagccatgctccgttttgtagaaaaaggcaggcttgataccgtcgtcaatttccacaacatcgtagtgctggactgctgcacccaaaatctcatcatccgatttttcattgcagcactcgaaaaactcatacggcgccagatcggtatgtccttcatagcgcaccgcatagcggaatgcagatggagaaatatcctcgcccagatccgcgcacatactgcggtgcatcctccattcacgctgattcttgaagccatagatccgcagctcacagggagccttgagcctgggacaccagcttggcacataggttttgggatcactgcgtttgaattttctcgcgcgctttcccgcaacacagaaacgctcccccaagtgcatggtgacgccctttttcttgatcggcaatctttccatgtattggagattatgtgggcaatcagcgcaggtcggttttcgcagcatcatcagccgcacctcctttttcttcgatattttctgcgtacagcggactttcgatgatctcatagcgggtaaaccatccggcggcatagccgtcccggtaagcctcccagaaatcctcgccgtactcctcacagtattcttctgtcggaaacgggatcgtccgattttccttttcctccgtcacaaggcgcgcaagctccttgcgggcctcctccttcaccgtgaaggctgccataccttccggagcaggaaaattgccctgatccgcatccgcccaggagtggacgatggtatagactctcttcgcatttccgcagatcatggcatggatcgactggttttccggcctgctcagccagtcctcaacagcggcgcggtcctccttacggaacatctctacaaactttgtgcgaaacgccgcacgaggcaagtcctgaccgatggagcggtgaaaatggtataaatgccggtataccgcagcaaggaaaccgtcagtgctatccgcctcaacgcgcctttgctccatgcacagccgcccgccgcagatcctgcatttcccgaccagacacaactgatagggctttatctccttcaggctgttgtaggtcaggctccattggacttgctccatgttctccgccaaatgcgcggccattccaagggcgtccctgcaagcgaccggcggacacgagcaaagtctctcatgctcatgccggcaatatgttctctcacacatttatgctgcctccttctttttctctttgtttcgttccttttcgcatagccggatcagcttctggcaccgatccatctcaaagccgccgatgtgggcaagctcttcagagagtctcagcttctttgccatccacttatagccctgcgttctgctcatgccccgctccttccaaaagctgtcaaagacctgatgggtctccatccgcttcatgcgaagggcttcgttggcaagattgcccagcggccgcgtgctgcccttatgacagcccacacgggcattgcagttctgacattgataaaatttctcacgttccaagcccagtcgttttgccgccgcgggaccataaacctttgccgcgggaacaagatggactgcgccgccgcaatagcggcagatcgtcggaatctctaccaaaggcatccctccttacgccgctttcgcagcagccggctgcgcggctttttgagttttcttctgtgcttccggccgcatggcattttgcagatagtaggcgtcctgcgtggcaagcgtcagcattccgccctgcgcgatccccagcgtgactgtcccgctcaaggctttcaggcaggtgacaagctgctttgcgttgaaccagtaatctcccgcaggggtgccggtcaatgcaattacctcaatgggcaccgatgcgctgacgcaatcgcctgcgcattggaatacaaggcgctgatcctgaaagctcagctttgcccggtttccggtaccaatgcttaggacggacgagagcgccgctctcatgtcgtgaatatccgtcagcacggtaaacgcattccggatgctgcctaccaactgatccgtatcgatgtagccgccctccatgagccgcgcgctgaaaaggaagttctcgcggaaaaagacgatgctctttcccgtggtgccgacgcggaattcatccttgtcctggcacatattcgagagctttccaagcgaggcggcggggatgagcaggctcacatcacccgtgctctgattgtcgcctctggccgtcacgatacagtttccgttgctgccggccgcgcgcagtcccgtgctggtaaacatgagattgacgcacttgagaagcggcttgctgttatcctgtgcggttgcaaatacggtgtgctgcgccatggcgggaatcccgctgagtttgacggtatcctccggaaaaggaagatccggctttggaaaagcgcctcgctcccatacatccacttcatagcaggcgtctccgcttctgagcgtcatgcgtccctgattttctgcccgacagagctgcacggtatcctgcggcagccgtgagagcatttctgcaagcatcttcgctccaaataccagcgccccattctcctgaacggcacaggggagcttttcctccagtgccgcttccagattagtcgaggtgacggtgagctttcctgcggcggcatccgcctccagcaaaacgccccgaagcacgtccaacggcgaatctgccggtgcgatggctgacgcacgcttgatggcgctcaacatttccgcccgattgatcgttacattcaaataatctcctcctttacgcagcaaagccgaagatcgacagttggttttcatccacctctgccttcttcgacttccgtttcttctgttcttccgcagtcctggcaagcagtccttcataaagtgcctgacgcacttgcgcctgcgccgtgcgcacgccgaaggaatccttggctgcgggtgccttttgttcttctgccgcagtctctttcagctgcgcagctgcgatgttctttttccgctccgggttaatgatcgccattttccgaaaggccgccgcaatatcctccacattatcccggatccccagcgccagctcctttgccatctgtgaggtcagatcctttacatcactcatggccgcaaggccctcttcagaaaatgtcccctcgatgatgcctgctaccgccaacttggaggccatcagcttcatggcctttgcctgcatggtatcggcgtagtagagcatatatacctccactctgggggcggtctgattgatccgccacgaccggcgggatgcctgccgcagcgtaaagaggttatagcccatggagtagaagataatggtggtaaaggcattgaggtcaaggccggtttccacgcagcgcgggttggtaatgagcacctgcaaaccgttcttgacacgcttgttgacccagtcctcccgcttatccgtagcgatctgcggcgtcaggatttctgtccgatagccttccgagcaaagaagctcctggagctttttctgtgaatccgtgcgcgtccaactggtatagatgagcacgcgctctccgtttgccgccttctgccgcaccagttccaatacccgttcctccttgggaaacaggcgggaaaaatcgccgcagttctttggcgttacaatgggcattccgtttatgggatgcactacctccgcttgatcgtagggctgatccgggtaaaccgtcagcaaattgagataggtggacaggatcttctgcgccgccttccggtctgtgcgcaggactttctgcaattcgtgttccgcctctttataggccgtgcgtacatcctccggcatctccagcggtacggggatctcttcgtagtccggcaggtctttgcccatgtcggagagggagagaaatgccgtgtattccagcaggaaacgggaaaataccagcggcgatacgccgggcagctgctttgactttgttctgcgcttactggtacgccggttggaattgtactccgcatcctgcatctcataggtattttccaccacgccgtactccgcatcaaaatcaccggggcttttgtagcgtttgccatccttgagcatcagcccaggaacaatgcggtagagcaggtgaaaaatgccggaggaatagccgttgataagcgttgccgtcattccgacaaaacacctggacgcgccgtacagctctgccatggcatcgccctgcccgctattgttgttgtactcgtgcagctcatcgcagaggaagccgtcgatgcgcccgcgcagctttttctcgatgtaggtactcaggggaaaccgccggtgcgctccgcggatcgggtagaatgcatccggattttgggcgatctcagtgagctgatcgagaacacgctcgtttttggtacgatgcagatgtgcctgcgcgccgtagcggtagacccatccgtattctccgatcttcacccagtcgatccgcttgtccggattgaccgcagaccatagcggcataccgcaatggggacaggtgtgatttttcttgtgctccttctgaaaaaagaactggtcggccggcaccgtatagcggctgccgtcctcgctgatctccatttcgatcacaccgtcgcagtctgggcagagaaacgcgcgtctgcgtcgattccaacgcacggcggggtaacgcatatagccatcccgcgcctgctccttggaaaaaacagcaaatacacttttgtcgcccttctcgtacatcgcatacagacggttgagatcctgaatcgtgcgcaccaccatgccgtaggtatctgggagcgtttctccaatttcccgcacccacttttgtgtgacgtgggagggacacatgacgatgccaaaggatttcctgccgtctttccgcttctgatcggcccacagcccgtgcaaagcgccaagagcagtcgaaccgatcttcgttttgccactaccgcattctgcgataatgagcgccacacgcttacgcgcaagctgccgcttgacggcttctgccaccgcaagctgcgcatcgtagagagaatatcccacacggctcatgatgcagtcgttgatagcgagcacttcatcggaaagcggttccttggcaggatcaaaaaggggcatgaactgattgcggatacggtcagctacggtaacgccaaaggtattgagatagcctgtgacattttccacattttcaaaaccgtctggcatattggggactgccccggggatctggatatctccgctctgcaagccctgctccagcacctccaccacattctgatcctgcggcttcagatccagcacccatgcatctatccgctctttcagggaaatgacctccagttgccggagatctccccgttggcgcagactgttgagcacataatcctgaaattccgggatcagcggcgctgccgttttacgatccagttcctcaaagagccgtctttgatccccggtgggacagaagatatagcacctgcggggctgcagctccatctgctccgtatctacgaggtttgtatcctcgtctttttcatgcttgccgcttctgtcctcctgtacggtgtccgcagccatcaatgttgccacggcgtagatcccatcgtgcgtgatctgccgctgataacttttgaggctgctctggagcattcgggtcgtgtcgttttgggcggcttctatcgttgcaccgccgtagatggcatctgccattgcccgcaccatttcggggtaaccgccaaagcggatggcactgatgatgctgccgttttgatcgtggtcgagcactatcgtatccgcataggccgacaagcgcacctgtgcggatgggtcatagtaactcagttcgatcagcttactattggacattcattgcctgactcctttcttttgacgaaacaaaaaaagaccgcaatcactcctatgagcaattacggtttcgttctcgtccttattatatttcaagccgtttgggttcgacggtactcgcaaggagcatgccacatctctaagcggtaaaaccgccatgagctgtgcaaagggcatactacctccttttcactctttctttcctaacttactccgccctaacttacttcgccctgaaatacagcttcattgtagcatcacaggggaaggctgtatagttggagtttttccatagtttctatgctgattcgagatccattccatatcaacgagcacatacatcttcgacacctccggtagttctttcttcgaattctaccgcaagcatacaagaagaggtgtccgaaagaacggacacctcgcagcctttagtatcatagtcgaagtgaaagatacaccaatctatgggataaatcattcccgcagattggtgtgtcttttcatgtcattcatgtgaagtcattgagaatctattgaattgcccctttgtattgtgctactgccattcaactccgctatctatcaatatgctgctgttccgtttggtcataggatttcgtatatcccaagtgatattccaacagcagagtgtgtgggaccatgtcaaaggtgctcacgccctcgacagcagtaaggactttgaccgcagcacgataaccgcagtagaagctgtggcaggccgcccaatgaacgcgctgctcccacgcacactcgatcgaggtcaaatgctctcgtcgctcttcatcaccatcaatctcgagctgctcgataagcttcttgttttcgtcatgcatcttcaaaaacagagtatggcgctgcatacccggcatctcaaagagatcttgcatgagatgcttttcaaatccatcgacaacaagatcttgattggaaaagcgctggacgaacccggaatacaggccggcgttgaaagcatactgggatgcataccgcagttttgcctcgtaattggttttgatctggcttaggatctcgttctcggactgctccaatgtggtggtgaaatagtcctcagccgctgtgtaatccttttcatcttcggaaaaatctgtttgcgccagtaccttgtatgtatcgagcaaatacttttgaaaagcaggggcaaatgcgcgtcctttcatttcctctaatgcgttttgtactgtcatgtcttcatccatccgtacagatttgatacaatcgtatcaagtgagtacatattacatgagtgaaagtgcgaaaacagtcggattaagggagaatgaaaaataaaattgcacctgccagatcgacaggtgcattgctcaaatgtgttttttgatgatcgggatcgaatttaatgccaactcaacaatggcatcttcttgctccttcgttagtccagagttttcaagttccttgcgaactctatgctccagaggagaatccgtcttcccagctaagtagtcgagtgaaacgtctagaatatccgagatgcgctcaatgagctggaaacttggtgacctgactccgttttctatgtgtcgaagtgagtctacagcaataccaatcttctcagcgagctgttcaccagttaggcggcggaactgccgtgcagtccgaatccggctgcccatgatttgcaatctcgtactcatttgatcttctcctacctatcctgtactttctcacagtatagatggatggcagaaaatcagaaatgagcattatggtatttaccgtactgaaatggtacgtaaacgaatgacctccggtacgacacataccgaaggccattcgctttaagtcacatttacaaactgagcctcaaagagtaagagaatatggtaacaaaaatcaaactgtaatatatctgtatagctttattctaccgtcttgtacggaaatatgaattggaggacgaaagcaaatgagtcgttgttgcatatattgccgcattggcggcaccgcaaatgaacccaaccaaatagccacgaacagccagcttgagatgctgcgaaaggctgctgaggatctcggccttaccgtcgtggcagaagtgacttttttgaaagtggcactgacccgcagcgtcagagcatcaaaacgctgatccgagatggaaagcacggcgtctatgattgcgtgctgattgttgatccatccagattatcaaggagcgctgagggctgcaccttgattggacagaagctgaaccggcatgggatcagagtctatacccctcagggaaagatccagctggccccacctcacgccttcttctattccagataccataaggaaggagaaaacgatcttggcccaggaaagtaaaaacgaggatcgcaagcaaaggatccgcgaggcgttccatgatggaaaacaagtagagcgaatgcctgcccgagaggacatggcccctcagcattccgacgatgttatctatcgggttgctccgtactgccgagtcagtacgatgtccgaaatgcaggcggagagttttgagatccagcaacagtactacaacgagttcattgccaagcacccgaattggacgctggttcgcatctatgccgatgaaggcatctcagcaacttcggtgaataaccgcaagccgttgtatttttcatcccgttatcggataagcgttacagcggcttttgaaaactctgtattgatttttctgcgcgaggtggtataatcggcatataccgaaaacaaaggaggcgcgtccatgccaagaccgccacggtgccgtcggatttgtggcgcaccgcaagttgataccttctgccccaacgggtgcgaggatgccgagccgatcctgctgacgctggacgagtacgaggtcattcggctggttgacctggagcagcaaacccacgagcagtgtgccgcgcaaatggagatttcccgctcgaccgtgcaggagatttacaaaagcgcacggcgcaagatcgcagcgtgtcttgtccacgggaaaccgctgcacatcaccgggggaaattaccgcatctgcggaggacaggaggcagcccactgtggccgctgctgccggatgcagagagccaacacagaaaaatccaacaaaaaatgcgaaggagattccactatgaaaattgcagtcacctatgaaaacggtcaaatctttcagcatttcggccacaccgagcagttcaagctttatgaagctgtggacggcaaaatcgtccatgcggaaatcgttgataccaacggcagcggtcacggcgcactggcaggcttcttgatgcagcacggcgtggacactttgatttgcggaggtatcggcggcggtgcgcaggcagctctggccgaagtgggcatcaagctctacggcggtgtcagcggggacgctgacgcagcggtgaacgcattgctcagcggaaatctgggctacgatcccaatgttcactgtgatcaccatgaccacgagcacggcgaagctggtcacacctgcggtgaccacggctgcggcaatcatagctgccattgatatggaacgcacactgacacaacttccgttctggtcatccttgactgaacaggagcaagaaacgctgcgccgaagcgcctttgtccgtcattatgaaaagggcgcatttgttcacagcagcgacaatgaatgtctcggaatgctgttcgtcctttccggtgatatccgcacctatcttctctccgaggaggggcgggagataacgctgttccgcctgtatccgggtgaactgtgcgtgctttctgcctcctgcgtgatcagtcagattacctttgatacgcaaatgaccgcaggaatggatacggaggttctgattatccctgcaaatgtcatcgctgtgctcaaggagcaaaatcttcatgtccgctgcttcctctatgagctggcaacgaaacgattttctgatgtgatgtgggcgatgcagcagatcatgttcaagggattggatcggcggctggcagaatttctccttgccgaagcggagcgtaccgactctgatacgatacgcatgacccatgagcagatcgcccagcacatcagctcggcgcgggaggcggtggcacggatgctcaaaggcttctcggaggacggactggtggagctgaagcgcggtgcgatcacgctgcgggatacagaaggattgaatcacttaaaatgaaaatattgtttttaacacgaatccgtgttataatatgagcaaaagaagctgaaaggagcatcgaccatgaaggaaacgaagtacgcaggcacccaaaccgaaaaaaatctgatggccgcctttgccggtgagtccgaggcacgcaacaagtacacctattttgcatccaaggccaagaaggaaggctacgagcagatcgcggcgttgttcctcaaaaccgctgataatgagaaggaacacgccaagctgtggttcaaagagctgaacggcatcggtgacaccgccgaaaatcttctcgccgccgctgagggcgagaactacgagtggacggatatgtacgacggctttgccaaaaccgccgatgaggaaggtttccatgagctggcccagcgtttccgcctggtagccgccattgaaaagcaccatgaggagcgctaccgtgccctgctgcacaatgtggagatggcggaggtctttgccaagagcgaggtcaaggtgtgggagtgccgcaactgcggtcacatcgtcgtgggtgagaaagccccggaggtttgccccgcctgcaaccatccccagagctattttgaaattcacgcagaaaactattaaagaaagaaaaggagaatcatcatggagcagaagttttacatttgcaagcattgcggcaacatcattgccaaggtcaaggatacgggcgttcccgtcatctgctgcggtgagccgatgagcgagatcgttcccggcaccaccgacgccgccgtggaaaagcacgtccctgtctggacggtggaaaacggcatcgtccacgtcaaggtcggctctgtggagcatcccatgctgccggagcactatatcgagtgggtctctctccacaccaagcagggcaaccagcgcaaggagctgcaccccggcgagaagcccgaggtctgctttgcactctgcgagggtgatgaggttgaggcggtctacgcatactgcaacctccatagtctgtggaaagcgtgatcgttccgcgcatggcatcttagaaccaacatagagaactgaatgtcatgtattgcaggcaggaggcaaacaagtcatgaaagcacataaatattggtcaatcggagcggtaattaccatgtttggaactttttgcactggatataaaggctcaaaaacagcgcataagtactttgcgcttagttccttgatctgcatggttatggcagtatatacgggtcataaaatgatttcagggaataagaaaacaaagagagtaaaacaagcggaagctgtggatattctttgagtaaaataggaatcgttattgtttctgatgacgataaagtcgggccaatgttgtgtacgaaataaaaaacatcaaaggagaatttcattatgaaatatctatgtgatgtgtgtggttgggaatacgatgaagaaaagggctatccggaaggcggcattgcaccgggtacaaaatgggaagatattccgaatgattttgaatgccccttatgttcagttggcaaagaccagttttctgtggctgagtaaggaagcacaacaaaacctataaacaaagagccgtgaagcagtatgtaagatcccgcttcacggctctttctcgcttatataaaaatttgccgtaacgtaacctcgtcacagaaaaatgctttgtcctgcggtatgataaagccacaatcaagaaagaggtggcgaacatgaaaatcaagctcaatcccgatcaggagattgtcaataccatccgggaaggactcaagcgcaccggcgggtactgtccctgccgcagagaacgcacagaggcaaccatatgtatgtgccaggagtttaaggaccagattgccgatcctgattacgagggctactgtcactgtatgctctactacaaatccctgaaggactgaggggggaacgccgtgttgtcaaaacgattggccgccgtggacacgacgcgatgcgtcgcctgcggcgtgtgtgaaaatacctgccccttgggggctgtcaaggtgcgccgcggctgttacgccgccgtggaggcggaacgctgcgttggctgcggcaagtgcgcgaggctctgtcccgtgggctgcatcgaggtgaaagcgagggacgaggcatgaagaaagcaaaacattggtacgactatctctggatctgcgccatcctctacttcaccctcggctttttcaacatcctctttgcgtggctgggcatgatcgacttcctgctgccgctgttcttagccatcttcggcgggaacaagtttttctgcaaccacctctgcggacggggtcaactgttcagcaagctggggacagaccttaaatgctcccgctgcaagcccacgccccgctggatgtcctcaaagtggttccgctacggctttttgatctttttcctaacgatgttcggcaacatggtgttccaaacctatctggtggcggcgggggccgcgtccctgcgggaggccattaagctgttctggacattccgtgtgccgtgggactgggcctacaccgccgggacggtgacggattgggtggcacagttcagcttcggcttttatagcttgatgctgacctcgctgctcatcggcctcatcgtcatggtgctctacaagccccgtacatggtgcgccttctgccccatggggactatgacccagagtatttgcaagctgaaaaacaaagactgacaatatacaaacgaaaggagcctttctcatggctgaactgaaaattactgctgcgaattttgaaaacgaggtactgcgttccgacaagcccgtcctgctggatttctacgcagactggtgcggaccgtgcaaaatgctcgctcccgtgctccacgagatcgctgaggaaagcactggtgccctcaaggtgggcaaggtcaatgtggacgagcagatggaactggcgatgcgttttcaggtatccagcatcccgatgctggtcgtattcaaggatggaaaggccgttgccagatcggtgggctatcggcctaagtcggagatcgccgccatggtggagggcgcaagatgaaagttgtgatcgtaggaggcgtggccggcggcgcgtctgccgccgcccgcctccgccgtctggatgaacacgcgcaaattgtgatgatcgagcgcagcggctatatgtcctatgccaactgcggtctgccgtattatgtgggcggtgtgatcaaggagcaggaagaactgacgctgcaaactccggagagcttctgggaccgctttcgcattgatgtacgggtacgtcaggaagtaactgagatcaatcccgcagagaaaaccgtcaccgttcacgcgctggacagcggcaagacctatacggaaacctatgacaaactgctcctcgcccccggcgcaaagccgacggttcctgcgctttccggcatcagcagcgagcgggtctttaccctgcgcacagtggaggacaccctccgcatcagtcgctttgtagaggatcagaagccgaaaaccgctgttttggctggcggcggctttatcggtctggaaatggcggaaaacctcgcagaaatgggcgtttccgtcaccatcgttcagcgtccgaagcagctattagcgccgttggatgcggatatggcgagctttgtccatgcggaaatgcgcagacacggcgtgactctgcggttgggtgaaaccgtcactggattccgacaggacggagcttccgtgctgaccctgttggagggtagtgagccactgcattcggatatggtgctgctggccatcggtgttaccccggatacgcatttggcaaaagaagccggactcaggcttggtattcgtggcagcatcgctgtcaacgagcggatggaaaccttcgtgccggacatctatgctgtgggcgatgctgtggaggtcacccatttcgtgaccggccagaaagcgttgatctcgctggcagggcctgccaacaagcagggacgcattgccgctgacaatatctgcggcggaagcagccgctttaccggctctcagggttcgtctgttctgaagctgtttggcttgacagcggcctctacggggatcaatgagaaggcagcgcagacagcagggatcgcttacgacaaagtcgtattgttcccggcatcccacgctgcctattatcccggcgcacggtctatgacaatgaaggtactgtatgaaaaagaaagcctgcggctgctgggtgcgcagatcgttggcggcgacggtgtggacaagcgcattgatgtactggcaacggccattcgcgcaaaaatgacagctttggaactgacggagcttgacctttcctatgcgccgccctattcctctgccaaagacccggtcaatatggcaggctttatgatcgaggatttggagggcgggaaggtgcggcagtttcattggagtgatgtcgaaagcttaccccacgatggcagcattacgctgctggatgtccgtacggaaggcgaatatcggcgtgggcacttgaatggattccgcaatattccgctggacgatctgcgggagcatttggacgagttagagcgggacaagcctatctatgtgaattgccagactgggcttcgcagttatctggcctgccgccttttgacgcagtacggcttcacctgtgcccatctctccggcggatacagcttttatcaggtcgtaacaaaagagcagcagacagtgcggagcgcctatccctgtggaatggagaagctatgagtgaaaatctatttggtttgacggttgcggcagataaaggcttggatgatctgcaatgccagcgccttttaagtgaaaatcgcaggtatcaggaagtcatgctgcaataccgctgtgcgctgaaagcgcttgaaagcaggttggaaattctgaacgaagagttttcattgcagcatgaccgcaatccgatagaaagcatgaaaagccgcttgaagtcgccgtccagcattatgaacaagatgcagaagcgcggactttctctggattttccgaccatgcaggcaaatatcatggatattgccggtgtgcgtgtgatctgctctttcgaggaggatgtgttctttttggcaaagtgtctaaaagaacagtctgacattgaaattatcacagagaaagattatatttcacaccctaagccaaatggctatcgcagtctgcacctaacgatccggctgccggtattctttgctgaaaaagagatccgtgtgccggtggagatacaactccgtacaatcgctatggacttctgggcaagccttgagcacaccatccgctataagaaaaatctgccgataaatacaaaaatcgaaaccgaactgaaagagtgcgccgattccagcagagagtgggacagcaaaatggagcatttactgcacatcctaacttaatatgcactgaataaaagaaaaagccttatatttcaacccatagaggccaatctgcggtataattggagcatatgtatcgttacagcaatggccagatcagcctggcggatttcaaacagccggtgggtatgaatctgaaggaaagcaaccgttgggtaaagaaagcccagacgatcccctggctggagattgagaagcgctacgccgtactattcaccaaccggaaaggcaatgtggccaagccgctgcgtctggccttgggtgcctgcatcattcaggcggagtatggctattctgacgaggaaaccgcgctccagattcaggaaaacccatatcttcagtatttctgcgggtatcctggctatgatgacgaaaagctgccctttgacccgtctttgatggtgtatttccgcaagcgcctgatgccggaagtgctgggtgagatcaatgagatgatcgtgcgggacgcaaaggagcgtcaggtcaaagaagccgaatccaaggatgacgatgatgattctgacggccagccgggaactggcggaaacagcggcactatgatcgtggacgccacctgcgcgccgtccaatatccgttatcctcaggatgtttccctgctcaacgaggccagggagaacgctgaaaagcttttggacgttcttcacgatcccgcggacggaaagaagcctcgaacctaccgcaaacgcgcccggaaagattccctgaaatacacaagatgccgtaaacataccgcgaaaatgacccgcaaagccattggaaagcagttggcttacctccggcgcgacctggatgccatcgatggcaaactgtccctcggaaaaaatctgccccctcgccaggcggagcgtttgggcacgatccgcgccgtctatgagcagcagaagtacatgtacgataaccgtacccacagcgtacctaaccggatcgtcagcgtgagccagccctttgttcggcccattgtgcggggaaaagcgggaaagccggtggagtttggcgcgaagctggacatcagtgtcgttgacggatggacgcggctggagtgctgttcttttgacacctacaatgaggcgggaaatctgcgggaaatgacagagcggtttcgagcgcgagaggggcattaccccagccggatcctggcggacaaaatctaccgaaaccgggagaatctcagctattgcaaggcgcatgggatccgcctttccggcccagctctggggcggcctaagaagggtgaaaccagagacaaggctcaggacgatcgggatgagtgcgagcgcgtggaagtggagcgcagattcagtctggcgaagcgtaaatgtggcatggggctggtcaccgcaaagctgcgggagactgagacccacgtgatcgccatgtccgttctggtgctgaatctccgcaagattcagcgcgctcttttgagaatgctcgcatattttctggagattctggctcagaacaaaaattgggcacttgttcagtggacattatattatatgaaataaattttacggctgtgcaggcatatctccaacaccgtgctatactgtacgggaaattgagagtaccatccgttcaaggaggtgtgcatggcaaaaccgatgtaaacatctcaccggaaaccatgctggacggaagtctgaccttgctgatgctgggagaaaatcaaaagctggaaaatacttccacctgtaagaatctgtacaggtacaattctcaacgtcctttagcaggcgtccttcttgacaatgtgaaaagaatggtgtatccttcgttcaaaagggagtagcttgcacagctttgtgtatccgttggcgtcagtacgggtcgtttggctccgctgcggattgaaatggcgagacttttgtatcaatgtgaaggcattgacgcaaaagggctcgccttttttgcgtccgccgaaaggagacacagtacatgaagcaggaaaagaacatttgggaacagtcccgcgtggagttgttccagaaactggattgccgggagaccggcctatcgcaggaggatgcggcggatcgtctggcaaaatacggagccaatgaactgcacgccggcaagcaaaagagtgttttgcagatctttctggggcagtttgcggattttctggtgttgatcctcatcctggccgccgtcatctccgcctgcatgggggacgtggagagcatgatcgtcattctggcggtcatcaccatgaacgcaattctgggcaccgttcagaccgtcaaggcctccgcatcgctggacagcctgaagcagatgtccgctcccaccgccaaggtgctgcgggacggtcagatcgtacagatccccggtcgagaggtggttcccggtgatgtggtcatattggaggcgggagattccgtctgtgccgacggacgcctgttggaatgtgccagcctgaagtgcgcggagagtgccctcaccggcgaaagcctgccggtggaaaaggatacggagccgctcagtggggaaacggccttgggcgacaggaagaacatggtgttctccggcagcttcgtcacctatgggcggggccgctttcttgtgacggccaccggcatggacacggaaatgggcaagatcgcccagcttctgaaaaacacggaggagcggaaaacgccgcttcaggtcagtctggaccagttcggcagaaagctgtcgatcatcattctggtgatctgcgcagtgctgtttggcgtcagtgtgctgtggcggcacgaaaacgtgatgaacgcctttctcttcgccgtggcgctggcggtggccgctatcccggaggccctcagctccatcgtgaccatcgtgctgtccttcggcacccggaaaatggccagggaacacgccatcatccgccatttgcaggcggtggaggggcttggcagcgtgtcggtcatctgctcggataagacgggtacgctgacccagaaccgtatgacggtgcgcaagctctacaccggaggcgaggtgatcgacgccaaggacgcggacttccgggacccgttacaggagccgttgctgcggacggctctgctgtgcagcgatgcggtcatcagcggggatacggagatcggcgaccccacggaaacggcactggtgcggctgggggagaccaacggctttgacgaggatctcgtccggaaccgctggccccgtctgacagagatccccttcgattccgaccggaaaatgatgtccacggtccacgagctggcgggtggcctgatgctggtcaccaagggcgcgacggatgtgctgctggaccgctgcgtggtgacgccggaggaacgggcgaggatcgaacaggtcaacgaacagttttccaacgagggcctgcgggtgctggccttcgcctgccgcagcgtggacggcccggccatcactttggcggatgaaaacagcctgactttcctcggcctcatcgccatgatggacccgccccgtgaggaatccaaggcggcggtggcggagtgcatccgcgccggtatccgtcctattatgatcaccggcgaccacaaaatcacggcggcggccattgcccgtgagatcggcattttgcgggacggcacggaggccgtggagggcgcggtcatcgacagcatgagcgacgaggaattgcaggagtttgtgccgaaggtcagcgtctacgcccgtgtgtccccggagcataagatccgcatcgtccgggcgtggcagcagcggggcaatctggtagccatgaccggcgacggcgtcaatgacgctcccgccctgaagcaggcggacatcggcgtggctatgggcatcacgggaacggaggtggccaaggatgccgccggtatggtgctgacggacgacaacttcgccaccattgtgaaggctgtaaaaaacggtcggaacgtgtatgccaacatcaagcgggccattcaatttctgctctccggcaatacggcgggcattttgacggtgctctacgcctctctgatgggactgcccgtgcccttcgcggcagtgcacctgctgttcatcaacctgctgacggactccctaccagccatcgcccttggcatggagccacacaccgacgaggtcatgtctgaaaagccacggccccggaacgaaggcatcctgacaaagcacttcctttatagcgtgggcgtcgagggactggtcatcgccgccgccaccgtcacggccttctatctggggctgaacgccggcggtgccgctgctggacagaccatggccttctccaccctgtgcctgagccgactgttccacggatttagctgcaaatcccagcatccggtgctgcttacccggcacttctggaacaaccgtgccctgttaggggcctttaccatcggcgctctgctgctggggctggtgctgctggttcctgcgctggaaccgctgttcgcaattgcgccgctgtctgttggcttggtcggtgccattgtgggactggcgtttggctctatgctggtgattcagcttctgaaatggatccggcggtaaacgagcaatattatttgctggtcgccgcgaagctgcgggagaccgcggctcatgtgatcgccatgtccgttctggtgctgaatctccgcaagatccagcgtgctcttttgagaatgctcgcatatcttctggagattctggctcagaacaaaaattgggcacttgttcagtggacattagttagaccgcttgagactggtgtcgtaggtcacaaaagttacattttgttgttcagctattcatctatctttcgtgtgcagatgaaattctactgtttttgagcattaaacgagctttgagcttgtagcaaggctcaaaaaaccagccccgcagcaggggggaaatttagatactcgattaatccgccaagctgatctggccattgctgtaacgatacatagttgccctccaggtacaaggtttttgctggatttttgccagttctcttgctccaattataccacagattggcctctatggattgaaatataaggctttttcttttattcagtgcacattaacttaattcgtcgaatataaaatgaaaagcacgcactttattgcttgtttcggttggatggcttaggcttgtcagggatcgccacatccgccttgggtgggcgacccctgcgagccccaaccgatttcttgctttctggttttcagtcatggtcttttctgctttcggcggactgccacggcacagctttttcggcttctataattggaaggaacatggcttttcgctgaatggaaagcgaagctgacccgggctggggcggtctgtgttaaagcaatatttttttggaaattatcttgacaaattttgtcaagattgatatgatggcactaacaagcaagcgaaaagaggatgcggagcatgatcatcaccaaagagacggactacgccctgcgcattttgcgggtgctgctggacggggagaaacattcggtggccgagatgtcggaaacggaattgatccccactcagtttgcctaccagatcctgcgcaaactctctgccggtaatttggtgcgggtgagccgcggcgccctcggcggctgcgaactgtcctgtgacctgggcgcgacctccctctacgatctcatgggggtcatgggggagcggggcatcctgtgcgcctgcatggagccgggatatgaatgccgctggcaggacaagcatgggcggtgcgccatccactgtcagctggcggccttgcaacaaaagcaggacgaggcgttccgtgccgtgagcctgcgcaggctgctgaccggcggatccgatccccaagatacaagcgagctgtaaaattttaagaggaggtacccgtatgctgtttcaaaccacggcggcgcacgaagagttgcgcacgaagatccggagttttgcggaggaggagatcaagcccctcgcgtttttgatggatcagaacaatgagtttcccgaggaggctgtcaagaagctgggtaagctgggctggatgggcattccctaccccaaggagtacggcggtgccggtctggatgccctgagctacgccatcgcggtggaggagctggcccgtgtggacggcggcgcgggcgtaatcctctccgcccacgtctcccttggctcatggcccattttcgcctatggcaccgaggagcagaagaagaaatatctggttccgctggccaagggcgagaagatcggcgccttcggcctcacggagcccaacgccggatccgacgccggcggcacggagaccacggcactggataagggggactactacctcctcaacggcggcaagatcttcattaccaacgcccctaaggcggacacctatgtggttttcgccgtcaccacgccggacatcggcacccggggcatctccgctttcatcgtggagaagggctggaagggctttgagttcggcgaccactatgacaagatgggtattcgctcctcctccacggcggagctgatcttcaacgacgtgaaggtccccaaggaaaacctgttgggcaaggagggcgagggcttcaagattgccatgtccacgctggacggtggacgcatcggcatcgccgcgcaggcgctgggcatcgcccagggcgcgttcgagcacgcgttgagctattccaaggagcgcgtccagttcggcaagcccatcgcggcccagcagagcatcgccttcaagctggcagatatggccaccaagctgcgctgcgcccggttcctcatctactccgcggcggagctgaaggagcagcacgcgccctacggcatggagtctgccatggcgaagatgtacgcctcggacatcgcgctggaggtcaccaacgacgccttgcagatccacggcggcagcggcttcctcaagggcatggaggtggaacgggcctaccgcgacgccaagatcaccaccatctacgagggcaccaacgagatccagcgggtggtcatcgcctctcatctggtgggcaggctgggcaagagctccggcggcgagagccgctcggcggccaagaagcccgcgcccatcaccggcattcgcaaaaagaccatcttccgggagggggatgccgcccagcaggtggccgaccttgtggcggcgctgaagaaggacggtcacgacttctccgtgggcatccctatggatacgcccatcccgcaggcggagcgggtggtctccgcgggcaagggcatcggggagaaaaagaacatgaaactggtagagtcgctggccaaggccgccggcgcggccatcggttcttcccgccctgtggcggagaccctcaaatatctgccgctgaaccgctatgtgggtatgtccggtcagaagttcaccggcaatctgtacatcgcctgcggcatctccggcgcgtcgcagcaccttaagggcatcaaggacgcctccaccatcgtggccatcaataagaacggtaacgcgcctatcttcaagaactgcgactacggcatcgtgggcgatgtggaggagatcctgcccctgctcaccgctgcgctggatagcggcgaaaagctgcccgcgccgcccatggtaaagatgaagcggcccacgccgccgaagcccgcccccatcggcgaccgctacgtctgcagcggctgcggctacgagtatgtgccggagttgggcgacgaggacggcgagatcgcgccgggtacgctctttgagcagcttcccgccgagtgggtgtgtcccgagtgcgcggagacgaaagatcaatttgtaaaggcttgagccgtgaaggaggtaagataagatgtattgcgtgcgtaaagtaacgaacgacctctactgggtgggcgccaacgaccatcgcctggccctgtttgaaaactgcttccccattccccggggcgtaagctacaactcctactgcctgctggatgaaaagacggtgctctttgacacggtggactggtctgcctgccgccagcttttggaaaatctgacgtatgtgctggatggccgcgagctggactacctgctggtcaaccatctggagccggatcacgccgcctgcatcgaggagatcctgctgcgccatcccaaggtgaaactgatctccaacgagaaggcattcatgctcatgcggcagttcggcttccatgtggacggacatgagtgcatcgaggtgaaagagggtgacaccttctccttcggcaagcacaccgtcacctttgtgggcgcgcctatggttcactggccggaggccatggtgaccctcgacgtcacagacggcgtcctcttttccgccgacgccttcggcaccttcggcgcgctggacggcaagctgttcgccgacgaggtggacttcgagcgggactggctggacgacgcccgccgctacctcaccaacatcgtgggcaagtacggcccccacatccagctcctgctgaaaaaggccggcggcgttttggatcagatcaagtacatctgcccgctccacggccccgtgtggcgcaaggatctgggctggttcatcgaaaagtacgacacatggagccgctatgcccctgagactcagggcgtgctcatcgtctacgcctccatgtacggcaacacggagaacgcggcgcaggcgctggcggcgtcgctctgcgataagggcatgagcaaggtggcgatgtacgatgtgtcctccactcatgtctcccagctgatctccgaggcgtttaagtacagtcacattgtcctggcctctgtgacctacaacctcggcatctaccccgccatgcatgacttcctcatggatatgaaggcactgaatctgcaaaaccgcacctttgccatcattgaaaacggctcatgggcggtgaagtccggtgacctcatgcagaaattcgtcaacgatgagcttaagaacatgacggtgctcaacgagcggctcagcctcgcctcgtccatgggcacggacaagcgcactgagctggaagcactggcggacgccattctggaatctatgaagtgactggcagggaagccaaaaccaagacaacagacaacaaacagccccgccgcgtcggctgcggaaaaaccggctttcaaaaacagagcgggcaagcgtgatactgcgcttgcccgctctctgcccaaaaggacatgagaagtgaccggagaagaggagaggatcgaaatggagatcagaaaacgaaacggggagtctgttccctttcaacaggagaaaattttcaacgccatgaaaaaagcgtttgatggacagggaagggagcttgggggcggagaactggaggagatcctcgccgccgttctcgacaatctctccgtcacagtaccgctcaccgtggaacgtgtgcaggacgaggtggagcggacgctcatggagcgcggacactatgaggtggccaaggcgtacatcctctatcgcgaaaagcggtctgcgctgcgccgcgtccggcataccatcgcgcagacggtgggggatgactcgcttgacgaggtgctgcgccgcatccagacggattttgccgaggaagtctactctctctcgacgcttcaaatgaagtttgagagcttctgtcgcccgggcatgacggaggatgagcgggctgaggcactgaccaaggcagcggtagagctgactacggcagaggcacccaagtgggagttcatcgcggcgcggcttctgaaccactcctttcgctgtcgcaacgcacaggaatgggaggggcgcggcatcggcgacctctatggcaggcttcgctatctgacggataagggactctacggtgactatatccttgcccactatacccacgaggagatcgccatggcggagggctttctctgcccggaacgggacgagctgttcacctactccggccttgacctgctgctcaaacgctatgtgatccagacacgcagccgcgtgccgctggaaacaccgcaggagatgtttttgggtatcgcgctgcatcttgctatgaacgaaggctctgaccgcatggggtgggtaaagcgcttttacgatatgctcagccgtatggaggtcacgatggcgacacctaccatgtccaacgcgcgaaagccctaccatcagctttcaagctgctttgtggacactgtgccggacagtctggacggcatctaccgctcgctggacaacttcgcaaaggtctctaaattcggcggtggaatggggatgtacttcggtaaggtgcgcgctgcaggcagcaccatccgcggctttcaaggggcggcgggcggtgttatccgctggatccggctggtcaacgacaccgccgtggcggtggatcagttggggatgcggcagggcgctgtggcggtttacttagacgcatggcaccgggatctgccggaattccttcaactgcgcaccaacaacggcgacgaccgcatgaaggcgcatgatgtgtttcctgccgtgtgctatccggatctcttctggcgactggcggaggagaacatagacgcgccgtggcatctcatgtgtccgcatgagatcctcacggtcaagggctacgctctggaggattactggggtacggaatgggagaagcggtatctggactgcgtcaatgacccgcgcatcgaaaagcgcagcgtcaccgtcaaggacatcgtgcggctggtgcttcgctcggcagtggagaccggcacgcccttcgccttcaaccgcgacagcgtaaatcgtatgaacccaaacggccacacgggaatgatctattgttccaacctctgcacggagatcgcgcagaacatggcacccatcgaacatatcagcactgaggtgcacacggagaacggcgacacggtcgtggtgacggccacacgccccggtgagtttgtggtctgcaatctggcgagcctgtctctcggtaatctgccggtggaggacgaggcctatatggaacgcacggtggaaacggccatccgcgcactggataatgtgatcgacctcaatttctacccgttggaatacgcgcggctcaccaatcagaagtaccgcagcatcggcctgggcgtcagcggctaccaccacatgctggcaaagcgcggcatccgctgggagagcgaggagcaccttgccttcaccgacgcggtgttcgagcacatcaactatgccgccgtcaaggcggacacagcactggcgcaggaaaagggtcgctatgcgctctttgagggcagcgactggcaaacgggcgcgtattttgaaaagcggggttatacctccgaaaagtggcgggcgcttgcggaaacggtggcggtgcagggaatgcgcaacgcctatctgctggcggtcgcaccgacctccagcacatctatcctctccggcacgtcggcgggcatcgatccaattatgaagaaattcttcttagaggagaaaaagggcagcatgctgccccgcgttgccccggagctttctatggatacatggtggtactataaggcggcgcatctgatcgaccaaagctggtcggtgcgcgccgcgggccttcgtcagagacatattgaccaggcgcagagcatgaatctctatatcaccaatgactattccatgcgtcaggtgctcagactgtatttagaggcgtggagggtcggcgtcaagaccatttactatgtccgcagcaaggcccttgaggtcgaggactgcgaaagctgctcgtcataaggaggatagcatgacggaactgaagaaaaagcccctctttaatccggagggcgaccttgatgtgcgcctgcggcgcatgatcggcggcaataccaccaacctcaacgacttcaacaatatgaagtacgcttgggtcagcgactggtaccggcaggccatgaacaacttttggatccctgaggagatcaatctctcgcaggatgtgaaggactatccccgcctactgtcagccgagcgcagcgcctacgataaaattttgagttttcttgtctttttggattccattcagacagcgaacttgcctaatatcggcgcctacattaccgccaacgaggtcaatctctgcctgtccattcaggcgtttcaggagtgtgtccactcacagagctacagctatatgctcgacaccatctgctctcctgtggagcgcaatgacatcctctaccaatggaaaacggacgagcatctgctgcgccgcaacaccttcattgggaactgctacaacgagtttcaggagcggaaggacgctcccacgctgctgcgcgtgatgatggcgaactatattttggagggcatctatttttacagcggctttatgttcttctacaatctctcccgaaacgggaagatgtccggttcggcgcaggagattcgctacatcaaccgcgatgagaacacgcacttgtggctgttccgcaatatcatcacggagctgcaaaaggagcagccggagttgttcaccgccgagagcgtacaagcgctgcgcgagatgatgcgtgagggcgtggagcaggagatcgcatgggggcattatgtgatcggcgacgacatcccggggctgaaccggcagatgatcagcgattacatccgctatctcggcaatcttcgctggacgagccttggctatcccgcattgtatccgggctttgagagcgaaccggagagcatggaatgggtcagccagtacgccgacgccaacatggtcaagaccgatttctttgaggcacgcagtaccgcctacgccaagagcaccgcactgatagacgatctataagaaaaccaaagacatcagaataggagatacactactatgaattacagcgctatgattcaaaatcgcagatccgttcacgcattccgcgaaaaggaagttccgagcgaggctatcggccagctccgatcctactatgaaaagacctgcccccgtcttgtcccggagattgcaacggagttgatcgtcttggacaaggatgcacagccggcactggagagctcagcgggctataagcaatttctcatcggagcaccgcactacctgctccttatgtctgccccgcattcctatgcgggcatcaacgccggctacatgatggaagatctcgtcctcaagctgactgagttggacattgacacctgctggatgaccttcaccgacagcgacaaaatcaaaaaggcactttctctcaccaccccgttagaggtggcggcaatcgttgcctttggctacggggaaaagaccgcaaaaaagctgcggctgaatatcttaagtatgtctcatatcgatgtgcgggccgagcagcagtactacgcgcccaaaaagggcgtgcatgatttggttcacatggggagctggagcaacaagtctgggcttgacgagatgatggacttctacgatgatatgctctggcagtccttctacgccgcttcgctctcccccagctatctcaaccgtcagccctatggcttccttgtgcaggatcacagcatctatttggtgcagcaagaggatgcctacaccgataatttggatgccgcattggatctcggtattgtcatgctccacttctccgccgtcgcctcccagtggacggggcaggtacgctgggaactttcacctgctgcgcccgacggcctgccggaaggacttcgctccgctgcggtgtaccacatgtaacggctcttggggaagcaaggcaacggtaaaatgcgcgaccgtcgatccgcggttgagcgtatgttctattagaaaagaagaacctatcagtcagagtctgagtaaggaaaataggaggtattttttatatggctatccgaacggtaacagatgccatccgctatgtaggggtggatgataacacattggcactctttgaaaaccagtaccccgtccagcctatgggagtgagctacaactcctatgtcattctggatgagaagatcgccgtgatggacagtgtggacgcacgggcggcagaagaatggctttccaatgtggctcgggtgttggaggggtgcagccccgactatcttgtggtcacacacatggagccggatcattccggcagcctcatgcggctggcacaaaagtacccggagatgaagatcgtgggaaacgcgaaaacatttaccctgatcaagcagttcttcggcacaggtgcattgtcggaagaccgtatgctggaggttggtgagggcagcacgatctctctgggctcacaccggctgcgcttcctgctggcgccgatggtacactggccggaggtgatggcagcgtatgaagaggaggaaaagatactgttctcggcggatgccttcggccgcttcggttcactggaacggactgcccatgccccctgggcgccgcaggcccgacggtattattacaacatcgtcggaaagtatggcgcacaggtgcaggcgctgctgaaaaaaatctccgcgctggagatcaaaacgatctgtccgctccatggccccctgctcacagaagacttgggggagtatctgcggctctatgatctctggtcacaatggaaaccggaagaaccggagggcatcctgatcgctcacgcatccatccatggaaataccgcatatgcatcggaggccctcaagagcaagctggagggaaaaggtgtacgagtcaccatgtgcgatctgacggcaacagacctttcctatgccgtgaccagcgcattctactgtgggaaactggtgttggcctgctccacttatgatggaggactgttcccgcccatgaaggagtttttggaacatttacagacaaagggattccgaaaccgccgaatcggcctcatggaaaacggctcatgggcccctgctgccgcgcggctgatgcgcgccgagttggaaaagatgaaggaactccgactgtgtgaaacggaggtatcgctgcgcggcgcactgaaccaaaccagcgaagcgcagatggacgctctggtggcggagctctgcgcggaataagctgcaacaaaccgcagctattgcagctattctcgtacagatgatggtcttactcatctgctttatgtcccaagggcagagtaccgtcatctcaggttgaggtcacgatgtagtgtggggcgagaccggagtcttgagaacgcataaaagcacagccgcagagtacatctgtggctgtgttttgtgttcagttgctcactgttgcgtggactggatatggagagacaacatatctcccgatcttacatgggttatcttatctgccatcactctggcagtttgccttgcagatatgtcggcatccccactgcggtcgtatccggcctgaccttaaacatggctttttcaatctacctcccttatcggttttccgcgatatatttttccgccatgtagactgccactgcgccgtccgccacggcggtgaccacctgacggaggggcttcgtccgcacgtcgcccacggcgtaaacgccgggaatactggtttccgtggtctctccggccacgatatagccgccgccgtccagcgccagttgacccgccgccagcgccgtggcgggctgtcggcccacgctgacaaatacgccgtcgcagtccaccacgctatcctcaccggtgacggtgtcccgcaggcggacgccggtcagcctgtccccggaaagcagcgcggaaacgacgctgttccaacggaattccacgttttcggcctgtgccagcgactcgtgatagatcttggtggcccgcagggtgtctctgcggtggacgaggatcaccttttttgccacgcggctgagaaggagggcatctgccgcggcggaattgccgccgcccaccacgaccaccgttttgcccttgtaaaacatcccgtcgcaggcggcgcagtaggccacgccccggcccaacagctccgtctctccagcaacgcccagcgttctggggtccgcaccggtggccagcaccacggttttcccccggaagatcccctcgctggtttccaagagcttgggaaccgccgtcagatccatgcggaggacttctgcgtattcgctgcgtaccccgaagcgctccgcctgcttttgcatcttctccgccagagagaagccgtcgatcccgtcctcaaagccgggatagttgtcgatctgctcggtcagtgccatctgcccaccggcggacagtttttccagcacgacggtgtccagccccgcccgtgccgcgtacagggcggcggtgtagccgcctgggccgccgcccaccacgagcatatcataaacatgattgttgttcatatctgaaccctccgttatttcgccaaggcttcctgaatgaaacggtcgatctctgcctttgagccgggtgcggtgacggaatccacggcctttccgtttcggtacagcaccagagttgggatgaccgcgatcccctcggctcccgccagccgcggctcctcgtcaatattgatcttgccgacaacgaggctgtccgcgtattcctctccgatcttctcatacgcagggccgatccttcggcaatagccgcaccagggcgcccagaaatccaccaaaacaggcttttcctcccggatcaactgcttaaactgctcctgattcatattcatagctgccatatctgtcagctcctttcctttgtttgggtatagtataccgcgtgacaagcggttttactgtgacggcgtcacataatttgagaaaatcggcgcggcgctgctctggttgtacgattatgattgccgctcccagccttggagatttgccgcgaaaatgtgagcagaaaaaagtcatgacttaatcaccgcgagggcttgtatatcacccgaaagggatagctacgaatacacaacgcaaaaagaaaagatacctggacgcggtgaaggcttaggctccttgagttctgcaaagcttttggagttcaaacagaaaataccaacagccaaagcgactgtgggtatgatcaaatcagattgtacgagctgacgctaccttgtcaatctctgcaggtccgtaggttgtctcaagggaaaatcggagccgattcggctccgatttgtgctttttaccgccgttcgctcggcggattttccattgtttccgtccagccctgcccgcttttttcgcgttctgggtcaaaagtgggtcagaggctgtaatatccgtagaggactggcgagctgcaaccttgcgccacagtccacactatctatcctcataccacaaatggcgtaaaagacagcgtttcgtgggtatatttttcccgcaccgcgttcgcctcgtcctcgctgacagggcggaagcccttgccgccaacatagtggtcggtcgtatcggagtagagccagccgtctaaagaaatcacagtttccaaatgccgcagcgcgccgttttcatagcggtagtaagagtaggtcccctcgctcgcaccgtcgctgccctcgtgggcgagactgccgtcggtgcagaggtaccagcggctgcggctccagccgtccacgacgcgaacggcttttgcgccgtcgaggcggtaaatattgaagatcacggtatggccgtcgccccagtccgcgccgagcagcagctcagggatcccatcaccgtcaagatcgcgcagcagccagccgggcgtctggtagtagtcgttcacggacaggagatcgtggctgaagtcggtctgcacgtcgcttgcgccggagcgccgcaggtcgctgatctcggcgagcagcgcgtcgtaggcagcgtagccggtcgcgttcaccgcatcgccgcgcgcagggggcgaaaacacggaggaggcagggcacatgtcatttatgtggattccgttgtccttcaaaaatcgcgtgagtacgccttgtgagtcgctttgcagtgcctcgtattggcgctggctgacaggatcgttttccaggaactgcacatcggacggcaacaccagcagatacacatactcatcatcggctccgaggacatactcggcgatgccgagaatctcggggacaggcagtgcgtcatagcccctccattccttgaaattatcccagctcatagcgaccagccaccatacgttgcccattcccccgtcgggatacgccgcaagtgcgttcttttccgacagatggaacagcatgatcccatatcccagataggcagtccccttgtcgtaggcggagagctctgcaatatcttcccatgcagcgggaacggtgagcgtcagcgacagcgtcggctcggtcatggttttcatttcctcctctgccggctcgcttgcgccaatacatccaaacagatagtctctcaactccgtacttccagaacgcagctcatagagccgcgctgtcttgccgtcagtaatggggttgaccagcatttcacgctcagagagcatgatctcgcagcgttcgcccgcggcgctgataaaatagagccttgcatagcagtcctccattgctgacgcagcaccaaggcgtttgtattgcagggcatccagcagagcatagacggcgtccgtttcttccgccgtcaactggacgttggatggctgcgcgccgcttgcgtccgttacatcggcataagtgacctgttcccgatggaaaccgaccagtccggcggcgtcggtatccgtaggcggattcgtcagaaagcacaccgctacaacgacgcacacggcgaccgacgccgcgaccacccagaacgcgggctttttgtagtgaagtgcattcttcacacgctccttgacgccaacttcaccgaacgccagcgggcaggtgatgactgccttgcgcggcatactgcacgcaagcagcaccgtggaataggtcttgacggcgctctcgtccatcgtgcggatcacccgctcatcgcaggccagttcaatgtcgcggcagagcagcgtataggcgagccacagcacggggttgaaccagtaaaccgcaagcagcgcgaagcccagcggtttccaccagtggtcacgccgcgcgagatgcgccctctcatgcgagagtacattctgccgttgcacctcgtccagcccggatggcagatagatgtgtggttttacaacaccgaggataaacggcgaggaaatggcatcgcaaagataaatgttatcctgaatggggagcgacacgctcacgcgtcggcgcagccgaagatagcttgcgagcgcatagagcagcatggctccaaggccgatgagccacacccagcctgcgatctccgtccagacatagagcgggttgacgctggctgtcggcacggcggcaaaatgttcgctgagtgagggattcacagcattgtcgatgacgctcacgccgctggtgatggtcggcgcgggagcagactgcacggccacgggactgaccgtttctgcactggggatcagactcagcgcactctctatggaaaatggcagcacaagccgcagcgcgacaataccccaaagcaggacattcacccacttgggcgaacgctttgataccaggcgcagtaccagcacggccagcaccagccagcttgcggaaatgcttagattcaagagcttcaaaaagacggcggccattggctcactcctttccgcagcggtcgatcatgcgctgaatttccgcaatgtccttctccgaaagagatttccgggtggtaaaagccgccagaaacgcgggaagagaaccgtcgaaggtgtcctccacaaatttctcgctctgtacggcgttatagccctcctgtgagagaagagaagtgaccgtgccgttttcgttctgaaagataccgtgttcgcaaagttttttgagtactgtgtaggtcgtggattttttccattgcagctcctgttcgcatagtttcaccagctcgccagaggtcagcggctcgtgctgccagatgagttccgcaaaacgcgtctcaacaacgcccagtttgtaaccgtccatgtgcgccccctttcttcgcgggtctacttatgatagacttatgatacttgaagtctatcataagtagactgtacctgtcaagcacattttgcaccattggaatcaatgatgaccacccgacctcagaaaatggcaagttagtcgctttgacaagcgggcgccgggtgtttcgacagcacgcaaagcgcgccgagggtagtgataccacctccgcctcgcacgttcagaaagtactgcacacagagcaaaaacagcatcaccaaattgcaaacagatttcaagatccaagacgtttacgaaagatcaccacttgctcatgatcttgccgtacatctggagcttttcctgatcgtagcgctgcaccatcagcatgacgtgctcgcccaccatgaagtccgcatcctcgtgctgataggagtagttacacatacaggtcacgccatcagggaggttgcagaacacgccgccgccatattttccggagatcatcgcaaagcggcgggagcctacagggtgacgctcctccgcaccaaagaaggggttgacttccgtttctttcgcggaaacaatcagttcaccggtacgggggtgatactcctttacaatgcagtcgatctccgagcccgggtggaactccgtgcgaagatccgggatggccgcgtagcggatctctctctgcgtcatatcaaggtcgtagccatagcagtccacaaggcagcggcgtgggccgactgccagcatcctgcaggtaatgcgggagccggcggtatgaagatcctcacgggcagcgaaaaagcggcgctggctgcggctggcctgacggcgggacgcctgtgcgcggttagcggcacgctccaccttggtaacgatcacatcgatgctggcgcccaccatatttcgcagcacgaagtcaggtcgctcctctcccaactcccacatttcggactcgcggatcagaatagggatgcgatacggcaccacaacggcacagagctcccgtctgttttcaagcattcttgcctcactgcgcggaaggtatcttgcgtagagatccacgccgatgatcgttccggtaatggcgctgcggccgcggaaagaggcatagacggagttccattccttccgctcctcttcacttagcccccgatccagttcgttgaagtccagctcgtagaagagcgtgcgctcgctctttttatccgacgcatcaagcgtttcggcgttatctgctgccaggtattcatcctccgcagcttctgctgcggcttcttccgggaccggttccacaaagccccagtccgcttcatcggcctcagaaacctgcggaacagaagtgggcaaatctgaaatcaaattctcctctgcatccggaaattccgacatctcttcgtgcagttccgcttcttccgctcgctcctctgcggtatcgctttcgtcttgggatgcagttttctcctctgcggaaagtccaagtggtttcgcctcggctgcctccattgcaggaagcgtttccgactgctctgccgtttcctccgcagaaagatccgcctccggcaactctgcgggaacgtcgccggtatctgcgcctgcctcatcaagcggcgcggtatccgataggatgctccccagggcagtttcttcaccgacagcatttacgatctcttcttccggggtgacttttttccttgccatataatgttcctcctaagtgttatattttttccggctcattggagccaaaaaagcgatgagtaccgtccttctgtcgggcggcgaaaaagtgatgccggggcagatcgatttctccaaaggaaccgctctcggagatccagatgatccgctcgcccttcatacgggggacggttgcaatgtgagtagcggcgtccagccatgccacgctgaaaaggtatccggccccctttccgtttccggtaaagcgcaggagaaatggttcatgcagtccgtctttcgagtaaaatccgggctgcacccttgtaagctccagcataacgtccagtgcttccaatagccgagggtctatcctgcggtctccgtaagaaaccacatcaccccgcagccagacataattggtgcctgtgcgcatctggcgaagcatgatctccatgcgcctttcgtcaattttgatttcctgtgtacggtaacgggcctgcaccagagcatgaagctggcggacacgcaggtacttaaactccttgagtatttcgagaatatacttttgctgattggatagcagcattgttttccctcccttcaaacggccgcgcagatggtgttgagatatgggtcgatcataagatcgctctcactttcggcaatgcagttgaacagcactgccatggtgtaggccgtgctgttttttacattccgctcctgattggcgcggagcttactctctgcctcccgcaggatcatgccgtccagccgtctgagctttgcccgcacacggctttgcggaagcgtggcattgccaatacggaagctgtcggcataaaaaagccgctcaatggcgttttcaaacaccagagcggtttccggtgcgaagcattcaagctcgcagccgtccaaaatatccaaaagttcttcttctgcgtccccgtcggtccgtccgtcctgcaccggggctctgacagacggacggacttccatatgactttgatcaatctttcttttttctttcttacttggcgtcaatttctgcggttctgggaacgcggattctgcagttcttgaagcgcgatcttcacgattcttggacagcagattctgcggttcttggcatgctgctgaaggtttcccatcagcaagaccctccagatccgaggttcttgaaccgcgtacttccgattcatcctccgtgataaacggcgcacaggaatagtccggatcttcgatcggtgtgacacgggcaagatagatctgattggcatcacctcgcccgcagcgtttttcccataccagcttgagctccaccaacttcttaaaagccgccgtgacccgctgctcacagatgcgtagctctttggcaagcgctttgcgaggaaagatcacaaagacctcgccgcggtcattgacccaaccgtttttgcgggaaagctggaaacggtttaagagaaaggtgtaggtcaccttggcatccaggctcatctcgcagtaacgtggatcagaaaataaccagcgcggcatctgcatatgataaatactctgcacatctgtctggcacatcagttggaaagttggacgctctttcattttcgctgccctcataacgggcacctcctctttctttttcgatataggcaatggggcgtttctattgacgccatgaagcgagagtacggtcagacagcacgctgacaatggaatatcttcttcaaaagaggccgattgctcgacctctttttcatattccgcgcccgggtggaatgcgcgtgggatcgtccatctcttccagttccgggtcatcgccttccagaatagcttcgcaggtcatctccacaagaccgatctcctccggagtcatgttgtcatttccgcaggagattccgctggctgcggcttcttcggtgggagaagtctggggctgccgtttccccgatgcaggcgacgactgtggtgcgggcggagcggccgatgtgcgatttcctgccgtgcgacgctttgcaccctcttcttctctctttttccattccggcacatagtcaaagacgctgcattttttcagctttttgtattccggcagttcctccagcatgatcttatagagctgggtgggcttatagtggttgaacatcacaatgcagagaaacttattgagccgcaggaattcatcgggctggaggaggtctcgctgggtgttgcttcgcgtctgggaataggggcgggtggtactgtagatgggagaaaacagcggtgccaagggaaactgattgttggtgacggagatcgtaaccttgccgcactttttagcaaagtattccgcactcgtcatatcgttgcagcccatgtagagagtcatatcaaaagaaccgagctgattttcccattccttccccggatacttttcctgccattgggagagggactgcaccgccacctgcacagacatattgaagccgcggatggagttgaaaacatcagagatgccctccatgtagccgatgttgagatattcttccaagcagaagtttgtcagtacgggaagccgcccgccatggagacgggcgtaattggagagctgcgggaaggtcagggagaaaaagagggagcttaaaaatcgataggcgctatcctgcgcggaaatgatgacaaagtacgcacagggcttttgcccgggaagaagcaggtctacatcgtggttgcgggtgatcttgtccaccagcggattttgaaagaccgcgagccggttgccaaggccgatgatgatgttgccccagaggttttctcttgccttcagaaagaggccgtgggggcctttggcgggatgctccggcggcagctccgcaaggatgcggttgatctcgttgacgcttttataggcgaggatcttatagacgtctccgaggctgcgctgctccaacggaagaagattgccgcgggcatccttcagattgcagacatagtggataagtgccatcaggaggttcaattccgcacggctccagaagtcatccgcctccttggggccagaggtgttttgaatgatggtgttggccacggtggttacaaggtcaggatttgcttccagtcccgcaaggcagttccaaccgtcagagtgcgccatatcgaggaaattgaccgccttgacatagaagccatgctcccgaaaatacggcgcaaggttttcaaagagttcgcctttggggtcggtcacaacaacggattcatggtgtccgccgctgcttcgctgcgcgcagcccatgaggaagggaatgataaagcttctggacttataggagccgggtgcgccgatgcagaggatgttattgttttccccaggcttcatgcggtgcgccacgtaggtggcgtatttttccggatcatccggccgcgccttaatgcgtccaaggagcattccggtaacttcttcggcgctgcccagctccagatgctcagcaagctccttttttgtcgcaaatccggaggtgccgtgagtgccgtccggcaggatatcaaagccgcgggcgtcccgggtaaatttgtagcctgaaaaccagctgtagccttttttcgtaatgaggcagaccataagggcaatgaaggcggaaacgccaaggccaaagggcgtaaaaacagcgaagagatttttgaaggggttgaatacccaaatgctctcgatcacttcaccggtggggttgaatacggattcctttcccaacttgagggaattgaggaacattccgtagagataccagccgatgccgcccagcaccgcatacagcggcacgcgggccttatttcgttcataccagcagccccatttatttgcgaggcaatcctctatcttttcgatcaacttggataagcggggcatccaccacggctcctttcttcgtcagatattgtgtgcaagggggaagatagagcgacggaggatggccgaacagctccgtcagaacgctctctgtcaccttatagatgacggcgtagccggtatctttatagcgccgcagcagcaccgcgtcaccctgagcatccaaggcggccagtgaaatcggcaggcatcccctcttttttgcgcttgcgatggcggcgtcgatccgccgcaggttcatatccgctccaatgacgaagggacggttctggtaggtggcgtcccacgcgggagcatcctccggcggagggcggtaagcagagcgcagcatcagctttgaaatcttcacgcggtagtccggaacagccataatttgaagctgacgcgcgcctgtttcatcgcaggagagcaggtgaacgggatagtgaagtccccgataggcttcgctgtatcggatcagcttggtatcccgcttttcatcacgcaccttgagttcctctatgatgtcagcgtaggaagctccggcaaagagaaaggcacgctgcgtgtctttgccgaaattggtgtgattatgaaacgctgccagttcgtcattgaccgccatgcggccgattccagaatagatataatgtaccgcgtagtaagtgctgcccagatgtgcaatcgccccgacgcgggcactgccccatggattgtgtccgcggcttcttgtaatcgcagtaataaacagcgtggaaggctccgccagactgttcgctgttattgtgaatacattgatccccgcatggtgagcagtcatcatcagagaggaaagccgcacacgccgctcaatcgccgcatcatggtacgagagcgtcaagtttggaacatcaccctctaaggctgcctgcaaaaaggctctaccgctgtttgtgagaagcagcgtgtcacttcgttgatggcgtttgatcaagcccagcgttatcaagttttcacgctctgtttctgtagagatactgctcaaatcatcgggacgcacattttgacaccagcagagaagcctcagaacatccatatctcttacgctcataagcacacatgaaccactcccttcccaattcctgcgaacgccgaaatcgcccttgcgccgaaaacggcgcaagaacaatttcggcgtccttacgagccgctatgtgggcgcagcctgttgcccccacatagtagacaggtcagtatgcgaaaaccggccaaaaacacttctcaaaaaagctgttgtttcaagccttccaagcccgctgacacccaacaggccagccgcgctgcaaagcagctccaaggcgcttgaaatcaggcagcaatctgttgggtgttttcgcagctttttcacctgctttgcccatcagcaccatccaccgaaatagaagtttccgggggcatagtcactggaatgtgcggagaaaaagtcatgagcatcggacaggggcaggacggtgatatgacagcactcctggctttgcactgccgtagaaagaagggcgactgccagcgtatgctggtcatcatccggaataagtcttcctttgatggcgttgctgaccgccttccaccccttgttgtcctgatcgaaaatatgccggccttccatggcggtatgctcatcaatgatcagcatggcccgctcaaaaaacggcaattcctttccacacgcctcatagctgtccagcagccgccgaatggtatcgctgagccagtttgggctttgataccggcaatggggcagcagcgtattgatcgtgatatggagccagccatagccaaaggcctccacgctgcccgttacatccatggatggcagaatcggctttttcgcaaagcccccgcttcccggtgcgtaccgctcgcagagttttcgcagttccagagtggctgcttcaaattgttccatcgtctgctccaatgtcttttgcagcttgtttggattcatctgcccgccgtctgtcagggcaaccagagagtcggtctgtcggaaggcattgccgatcagctcctgaatccgcatcatatcccgctttagatcattcatcgatttgccccgttcgctttacgcgcagatcggtgggtgaagtggtaatggcttcatattcctttggcgtcgtgtggaacgcaatgggaacatggttgtagccgatgcagagaagtccctcgccgcgccgaaagcgggtgatctgccgaacctcatcttcggaaaggttcagcttatcctgaatgagccgtgcctcctgctcctccatctgcataaccagtttaatgcggctggaatcgaggattcctttgccgtaactcccgccctccagactgaaaaggtcctgcattccctgggtgctggtaactgcgatcccgccaaggccacggatggtctttaccatttccagcacaaaccctgccgcctgcgggtttgccgtagcacccacaaggctccataactcgtctgccagcagcgccgagagttcgtcctcacagttcataatgaggtcgtaggcgatgctggtggcccagaaggtgccgtccgcgatcatatcatccggcataccggagagatcgaggacaatgtacttattgttaagttcaatatcgtttcggcctgccattgccgcagccgagccagtgacatagcgggagagcactactgccagatgccgcgtgtcctgctcttgataaagaatctcataccagtccgagagaatgggcatggtgcggaaatttccgttctcatcgacaatggtgctgttgtcgaaggtgatgccgtagcgcttataaacttccaccagcgaggagtcaaggcggctcttatcctcttcgctcagatcctttttcttcagagaaaaccagatgatcagctgcgcgatcttgtctgccagcacagagtcatcccgcgcggcgatatttttgagctttgcgtaggagtccagcgatttccgccgaatcgccatcagattcgggcagtctttggaggacggcgacattcgcaaatacagcccacccagacgctcacagaggggacgaaattcatgccctttcttgggaacaatgatgatgacccgcttgccctgctcccgcagccgcccgccgagacattgcagcgtcaccgttttgcctgcaccggtagagccgccgatccaccagttgccgctggtgtacttataatcatcatagggattgagaaataccggagagcggttatagaggttcagtcccagaaagatcccgtcatggtcgctcagctcataggaaacaaacggaaaggctgctgccacgccggaggtcagcgcattgcggcgtgccttacgctcaatatccggatcaagcgccagaatgggaagagccgagagaaacgcctgctcgtttttatagtcgcagcgccgtgcgatcatatccacggatacgcacagcttctccacctctgtgacgcgctgttccagcgtttcgggatcagatgccgtcacttcaatcaaggtatgcatataatagaaattctcgccttgccggttcattacatccttgagataaaggccggaactgatcgcactatccagttcctcgtagtcctgccgcgtatcgcccacatcccgcatccgggagcggttgaccatagtggtctgggcgattttggagaggatcttttccttgggctgacgcttgacgagaaaactcaggttaatcccttcgccagcctccaccaaaggcgcaagccagcaggtgccaaccgtggtggtgtaaccgtagcccgtgatatagagataagcatgatacacgtcgtctacgatgatgtagtcacggctttttgtatccaccgtggtgggagagagaatgtcgagaatggtggtggagccggcttcaagctcactgagatccggcttttcttcgccaaagagcatccgcttcaaaaaaggctgttttttgatttgatcttccgaaggctgttttttctttctggacttctctggaactgcttttgcagtttttttcggttttttctttacttgcatcgtcttactcctcataaatgccgtgaacggccgttgtcatatcgaaaacgccctccggcaaacgcacacgctggctggttttcttgttcaaaatctcatagagcagcttgagcacaaaattatcggaatactgaggctctaatacctccagttcacatagatccagataccgccttgcggtgtcggcctcttcgttgagccgctggatgatggcctgcaccgtgttgcgcttggcccgcatggagggttcatactgaaacacaagaaaaaagcgatgccgcatggcgccgccggcgatgccgtgaccgatctcccgaatgttatcctcgatcatctcccggcacgcttcgttttcctcctgttctgcatagcgctgcatctgctctacatacgcctgcgtgtccgcgggcagcgtgcgggcgatcatctgcagttcatccggcgcgatctgcaaatacgatgcaaaggacgagataatattctgccggtcaatggcagacttcagatagatgttgacaggcagcacttccatgatcttcacaaagcggttatctttggtgatgactacgccgccgatgatatttttgattgggagccacgcctgcacgctgtcacggtatacgccgccgctgccgccggtatggacgccttcgccaaaaatcagttccttgagattcatttcctgacctcccctcgaaataagataatccggcgggatctccgccatttccaccagcttcccagccaccgtgtcatactgtcatcactgatgccgatcagcccaaagccgcccagcggcacaatgatcgtcagcgtcactatgattttcggagtcagatccagcgggagaaaagcaatgcaaagatacagtgccgggagcgtcaggaggacagcctccaccagattccgcagctcaaagagtcccataacgcggcctgcatctgtaaaattggtaggaatgtgatagacctcatagttcattcggatccacctccacggcatctaacagatgtcctttgtgctcatagcaaatctgtgccagcttcatcagctcctctgcacgggagagaatgatatccagcatggcacggtccagcgtttccgcatttctgggcgtacagtttgccctgcccagttccagcaggctcaaatactggttgctgaagctgctgtgctcttccaattccatcagcgtaatgccgcatttcagccgtatatagcgtaaataggttgtctccgccaattactccacctccagatagtcgatatagggcagcttacaccacccctgccagccgcgtccgctgacttcggttttcacaacgccttttcgcgttcccatggcttctattgcgtaaccgccgccaatataaacgccggcgtgtccgcttttccataacatcagtccggggatttccggcatggaggataccgtgccgtagtctgttccctgaatgccggcattctttgccgcctgatacatctgatccgcaccgtaatccggcattccgtttgcggcataaccgatgcgcatggtggaagcatccagccacgcataacctttgatcaggccgatgcagtctgccgtgcgccgtcccagccagtttgcttcaataaaatcagcgtaattgccgactccgtccgggtactgctgctttttataggcaaagagggactctgtgagaatattgccgtaggttccccacacatagccccagttgttctcccacgcctgcaccgcataggcggcaaggtcgagattatttttcgtagacgggctgacaaaacgggaaatgtcaatgtcattatcatagcttgtaccatgctgaatatcgccggaataggagccatccccgctgtaatccggttggtaggcgctgaagtacccgccgtacttctcaagcgcgccgctatccttcagcgtttcaaagagggcgcctgcccactgtctggcatcctcattgaagcccatctgttccatcaactcttccggatcgatccgcttgatctctacctccagcgttgcggaggtactgccacccagaagagaaagcgatggctgataggacagggtggatcggcagaaattctgaatcagctccgcgctcatggcgtccagatcctgctcataggcggcggaattgattgcaatgatccagagcaggtcattctctttcatcgtgtttttgacttcaatatggtcaattgccgttccatccgcctcatattccgccgcaataccggttacgatggagtcgatctgcgttcgctcgaaatcatccagactcatatacgccccgcctatacgcatggcttgttccgtcatatggatcaccgaagcggtatcagaggaatcgtagccgaaaaaaatattgggcagcgctgtaaatactaccatcgggatcacgattaggatgagcagaacggcaaggagaaactttaccagggccggaacggtttcttttaccgcagcggcagcggcaccgtgaacaccagacaccgcagcagcctgcgcaatccggtaggctgcttttgcggcatggccaagatcagccgccgtttgaagggaagatcgggaattgtctttctcatccatgcttcttaccccgctgttttcttgacggttttacatcgccgtctgcctttacgctgcctttgagtgccgcagttgtggataccgctttctttccgggctgcgcgctgcttttcgcagaaggtgcggacggtctgactgtctgccgcgactgtgatgccgatgggacgcctgccgccgttcctgccgggtcggggtgtcggttaggcgctgtccctttgagtgtcggcgcggcggctgcggaagcactgcgcgattcctgccggatcggactatgctgccgtgcatccggagaaactgccgtgcggcttggaataccattcctgccgggtcgcggttctccagacggccgctgcgcagaaacggcgctttgcattcctgcggtgccggggtgcgggctttccgcccgaggcggcgatgcctgaccggttggctgcttgggtggccgctgcgtatagcgcgcattgggtgtatgttgctgcacggtctgtattccgccgcgaacagaggcggtggtaagcatcgcgccaccaatccccgccgcaggtcttggagagttgtcctgcaaagtgttcacggtggtttgtcccaccgtgatccctgtgtgctctgcggcctgcgtcacctgaccagttgctccaccctgtactttttgtgcgtttatctgactcatacgggaagcggatggtgctgccgacgttcctgcacggctgggctgcgttgtctctggcgaatgtactctcatgcgctgcgaggctggggagcgcacgccgctttgaagagtctctgccgctcccgccacactggggcgtgccgaagcgtcagcttttcctgccgtaccgggtctgccggatgcattctgcgcaccgacaggcggtatctttgttgcagccttgatatgtgtcggagagcggcgtgtgccgagaggaacagaacttttccgttcctgcgagggccttggcgctgtcgaatttttaggcatactgtcctgcgcagcagatggggcggacttttcctgcgagggtgattgcggcgcgcctgtatgtactgaggcgctttgcgcatcagacgatttctgtgatgtgctttgatttgtgctgctttgctgcgctgcgctttgccggacatactccgccgtgttgccatgacctccgctgggcccgcccatgcgggggccgccggacggcgcgttgggcgcagcgcctttgccgccgtttcctgcggacttgcccactgcctttgtaatttgagaagccgcactgcgaaccaccatataagtcagcgtgccggggagtcctcttcccagagagtcgccggtgatagcgggatttaagccgatgcgtgttacaatggcgtctgctttccgtgcgaccttgacaatcgtaaggatcagtacaatccacgggagaacatctaaaccgctgggaactgtggcaagaacagacagcagcattttgaagaaaatcacatttgtcaccatcaaaaggcacatactgccgaacattcggcaccagcctgtgaaaatctccgaggtgcttttgctgccgcccatagcaaaggccagcggcgctgtgatcgtaagcatggcgaggatgacataccgctccgcaatctccaaaagaagcttaaacaccttgaacatcacgataatgccgaaaataatgaccagcagccatgctgcacctatggctccgaatacgctctcatctacaaatgtgacattaactgcgtcaggaatctggagcagctcaatgatctttgacgtcatactcagcccgatctcgcagatctgcggacttgccagcagtaaaaacgcaaaaacgaaggtgcgggcaaagagcagctttggatcttctccttcaaagccaagccctactgccatacttttgagcgcctgaaaaaccagattgccgatcaggagagcccaaccaactgccagaaggatctgcatgatctcgtccacaacgggagcgtggcttttcagatatgcaaaatccatactcataatatccagcagcgccgtagagaaatattgccagcattccagagcgagcccataggcccattcgagaaagccttgaaaaataagctcaagcaacggggacacctcctttgcgccggagctttgacctcattacggcgtcagagtggcaaggccgctgaagagcggtgcaacataggcgataaaagcgccgatgccgttgataatggcccatgcgacccaaatgcgcttgagccaatcccacgcctgatcggtcttatgctgattatttgaaatctttgcgccgatcacggcaacggcggacattaaacctgccagcaccgtactgatgccgacaatttttgtgtaaacatctacgataatgcggttggcaactgtccacatatcgtctacggcaaaggctgatgcggtcatcgcggccataacccacatcagggtcataataagtgtgtagaatttgtagcattttctgatcatagaaagcggctcctttttacgagagaatactggaatcgggaatttcgatctttttgtcatatgaaaataaagctaagctgcatagtacaatagattttttgatatttgccgttactcattgtacgagccaagaaaagtgtccttgcaatcaaggtattgtttcgttataattaaatcgttatgaggtgatagctttgatatttacgagcgaggaaattgcaatgattgaaggagttctcggctcctttttttctgataatcatacatcagaagacctgagaaaagcctattcccgtgtatggcagcatcttgcagcggatacattagattccgaggatcttcggcgcatttcctctgcggtcgattttgcaatgaaaaatcagttctgtgaatcatgcagcagagaaagccagcgtgttctgacaacggtactcatcaagtcgatttccgcacaatgattgaagcataatttgtatatagcaggcggcaaccagcgtaaagctggttgccgcctttcagtagttaatatcccgtcttgggcagtttcggggtagtgccgatcttgcggacaatggtgatccagttggctgttgcggtctgccaggtaccctgatacttgccgccggcatcggcgcggttgaccatctggtagccattgaccgccatgcccttgaccatcacgctcagagtgggattcgccacagactggaagcccaccggcacggttccgaagtcaaaatagatgtcggttaccacctcacctgcctgcatggggatggcgtttagggcaaagctgtagttgttgctgctcagcagattggacgccaacacctgatagcttgcgctgtagttggtcttatagaggatgcggtaggtaagccgcgcactgtaggtgccggtactcagcaccgttgcgttggcaatatccgttggaatgcggtcatgccagaagaatgactccagcggcacattgctggtgttggcaacggtgaagtcatagcgcatctgactgccagccatcacagcactattgccgcgcttggtgatcgtaacgcccagagaggaaggtttatcgtaggcagacagcttgatgatctgactgggatattccagcgtgacatcaaacatttccgaggacacctgccaatacgcaggcgctgtgacctcacgaatctgataacgggtcagcggcagcgccttgcttgccgcaacgccgcgggcatcggtggtgatatagtccaccaccttgccgctgcgggcattgacgatctcataaacagcgcccttgagcggggtgcctgcggcggtgccggtgacctcgttatactcagcggcgtacttataaatctggatctggcccgtgacagcggtattttcccactcgatctccacggtcttgcccggagagacatagacggtcttatactgcttatccagcgtgtagccgggggcggcttccagctctctcagataaaagcggccactcagcccgccagggatctcgtcaatgtagatgtagccctcatcgtccgaggtgtactcgccgatgggcttcttgttcgcatcatagaggacaaactttacgccatagattccctctcccgtggcgctgtcaattttgtggatgacgatgccgctgagctttttgttggtcacctgcagcgtcacacgcttgccgtccttgatctcaaaatagtggggcgtatcatccagccggaacgatttgttcgatgtgacctcttttgcatagtagctgccatcctccagagccacgaacacacggccatttttgtccgtcgtaacggtatccaccaaggcatcatccaccttgcggatctcaaaggtcgtgttggggatgcgctcactgtggttatcctcgttgaccttgatgatctccacgccaccaataggcgtgttgtagaagtgaagcgtttgcgtgtcattgggattgaccacgacagtctgcgtgcgggtgttttcatcaatggtgtaaccgggaattgtctcaacctccgtcaccaccacggtaccggagatgccggaaatggtgatttttccttctttatccgtccagtacaggccggtggaggacagcgcgccgccctcggcatctacatacgagccatctgcgtaggtaattttgaactgaacgccctccaacggctcctttgtaacggagtcctgcttgacgatgatgaggttgcccttgggctggttgcggaactccaccgtgacaacctcgttggatttgaccttgacggtctgcggggtatcgtcaagaatgtaccccgccttcgcacgggtttccttgatgacaagtgtggtaccgggggcgatgtcggtaatggtgaacgtgcccacgctgtccgtcacaaatttgccgttggcgttgccgatgagattgccgtccgaatctgtgacaaggaactcaacatcggagatgggcacattcgtcacagcgtccacctttttcacaagcacaccgcccttgggctgattacggaattccagcgtcatgacagagttgcgcttgatcttgatgctctgcggggtatcgtccagaatgtagccgtcttttgcccgcacctcacgggcgatgactgtcatgccgggagtcaggccgtcaatgcggatggtgcctgcgctatcggtcacatactttccgttggcgttgccgatcacgctgccatccgaatcggtgatgaagaactccacatcggaaatgggagcgccggtcacggcgtcctttttgacgatgaggagggaacccatcttatcattgccgaaggtcacggtgatcacgtcctgatccttaccggaaagatagactgtttccgtggcatcggtgatcacgtacccgtccggcgcggaaatctcctcgcagacataagtgcctgccttgagaccggtcacgacgatggttccattgctcgaagtgcggtactcgccgatgaccgtgccacccgtaccggaggtgccgccaaggtagcggatgcggaaccatgcaccttccaacggctgaccgctctcactgtccaccttgcggatgatgatggcggaaaggggcgtgttttcaaatgtcaggactttgctctcgccgccggagatgaagcattcctgcgtggcaggctccttgatggcgtacccggacgccggttccaattccgttactttataccagccatccttgatctcaggaagaatgatttttccgcttgcgtcagaaaagtaagtgccgaggtcattgagctcgccggtgtcggtgtggttgctggcataccagatctggaacttggctcccttgacgggatcaccggtgacgctatccaacttgcggatctccagactgggcttgagggcgttgaagaaggtgacggtagaggtttcaccagccttcaacgccacttcctgcgggatggggcagagaatgacatgactgggaacattgatctctgttaccttaaatgtgccaaccgggacagagtcgaggaagatgcggccatggttatcggtggtggcgctggtggagaagttgccgtcgatctgctcgatgcggtaggtcacgccctcgatgggctcaccattggcgatgttcttcttgacaatttcaagaccgggcttttcatagtcaacgaaaatgacctcggaggttttgccggggcggagtgccacggtctgctccgtattgctcacgatgtacggctcgggaacggattcctcgcgcacgacatagacaccggcaggaatggccgagagcgttgcggagccgtccgtcccggtcgtgacggaggtggaataacttccggtaacggacttaatggaaaagaccgtgccgacgataggcttgccgctcatggcgtcgcgcttggtgatcttcatatcgggcagtgcgtaattttcggcagtgaccgtgtactgcttatcgccgtccgtggtatccacatagacgctgataggggtaggatcggcgcagtacccggccggagcctccgtttctacgaagctccacaggcccttggtgacgtcgttgacctcaatgatgccgccgtttgccgttacatcgctgcccacgatctgaccgtcccggtaaatcagaaagcgggcaccatctaaaccacgggttgttcctgcggcaaccttcttcagcgtaatatcgcctgtacccgcagggggaatatccggttctcccggctgcgcttcaagagagagttttctcggcgcgtaatagttgaaaaaactctggcggccctttacgctggactttgcccacactgcccattttgcggtgttatcttcaacaaccgtagcaatgacgccctgtgcggcgtactcctcgatctgcttctggaaggctgcgtcctcctttgctttttcggctaacatccagtcaatatagccgagataggtttcataggtatccgcgttggcgtaaccgccaccgtcaatatctccatcgccctcacccttaaaggtctggtgatcccacacataggtctgcgccgccatgaagaggctgccgggaatatttcccttgtaatcgacgatataggtcatcatccacttgaagttttcaagctgctgggcgtccagctcacccatgccactttgcgccagggccgttttcaagacagcgtccgcatcggctccggtggcagaggtataggtgtagctgttgagaaacgaggctgtcccccagcgatagccatagccgcgatccatgcagtagagcattttgcctgccgccatgggcggcttatagctgtagggcgttccatcatggagcaggcgggtcgtccagtaatttgtgttgctggtcggtttgatgccggtaccggtgctggaggccgccaatgccgaggtaggcagcaggctcagaacggtcaccagtacaagcagcagtgataaaagtcttgttcgcatctttttcaaggtcttttcctcctttttcgcaaaagataagcagaccaagtttcctcggtctgcttggttgtgttatgaaattgttcatcgtaattggacttccgttaatgtcaactgattatgcgaagtcacccttttgctgcgggcgcatccacccatgtgacattgtagccgtccaataagaaaagctgaacgcaataccagtagggctcgcccatgacagtgccttgtgaaacaccaacgccgatcgcatggtatctcgtattgagcatatttttcagatgtgccgcgctattcttccacgcttcaactgcaaaggacgggagcgaagaatctcgaatctgccattctccgatcaagtgaatattttcaccgatgtatttgcagtccgtgactgtcgtatactttctcccgtccggccttgtgtgagagtagacaccgctggccgccatctcatctgcccgtacctgcgccgcctgcatgagcttgtcgttgacagtcagcgcggcaacacctttttcgcggcgcagagcgttggttcggtcaatgatgtcctgcttggccgcagcagcatcgaagggctctgctgtttcctgcacggcggctgcgtccgatgttccattggcagagagatttggctgtgtagtttcggacaatttcacgtcataaccaagccttgccaacgtgtggcagatcagcaccgccatatttccgcgggtaatctcggcgtccgcaacagtttcttccgcagcaagtcccaactgaacggcagtccggcaggcagactgataatcccatacagcatcaacatcattcaagcaccgcagcatcaccgtgcaggccgccgcagaagtaacagggtcattggagccgtagcgtccattgccataccctgcaaccagattatttgcggcgcagtagcccacatagccttttgcccattccggaacatccgtaaagctgcaaaggctgcggtaaaaggcgctgtccgtttcaaattgttcaggatctgcgacaactcgggtgagcagcgccgccatctgcgcccgtgtcagcccctgctccagcatcatgtcgccggactcgttgcccagcataatgccggcttcactcagataggcggcagcagactgctgcggacttttttcggcggcaaaagaagttactgttaaggatagtgcagcaattacagcgagggaaataactcggatccgcttcaaatgatcacgcccctttccggtaaaagacggtggttacacttgcggtcatgcgtcgggtagcttcgtcaaaggtgcattgatcaaactcgcaaatgcccatccgttctgcctgttccgcgacttccgcgggaaggtcaacagtgatgtccattttgacccgtatttcgtcatctttcctatttggtctgaaattctgtaccaaactgatacttccttttgattaagattctccggagtgatttgaggataatacagaagattcaggctgtcaaaggtttattttaaatccttacgccgataaaacggagacacaacattttttgcacaattccatccgttttccatcattttattgcgttatttgcactgcttgaacgcaaattcttttttcaggctgattagcgaggcaggtggtaagcgtgatacggttgtctgctgtcgcctgcagataactccagtcggaattagagatggtctttaccaaaacgacctcatatgtgcgggtgccgtagattgtggtataggtgatggtgtcaccgatttccagatccttgatgctgccgatggtgtacttggcgcctcggttatggccgcacacgccgatattgccgtcccacgctgaggtggagctataatgccccagtccctttttcatgctctcgttggtttctccttcccagaccttcatgttgatgtccagggagggaattttcagggtaccgatgctgccgtcctttcgctccatatctttggcacttgtataagcaggctcctgataggacggaatgacgggtgtgaccgctgggatacctacgccactatccacaccgtagataccggaagccgaaccgcctacagtctgctgtaggccggggagtcggagcttttccatgacgccggtttgtgtggtgctgagaacgccgtagggaagttcgggaatctgataatccacaagatttttgctaccgtaatgatacgcagtaccgtaggtgtcctcataagaggttgaagggtaatagtcggtgtctgcggctgtgtcaaaggtatagtccgcggcaaaagcgcaaatagaaagggatgctgttgctgtcgccgtcaatgccatgcagaccagtttctgaaagagtttcatgtttttacgcctcctgatcttcttcgttttcctctgtttcatccgcttcacattctgctttcactacggcctttcggcggcatacaagcagcgtgccgccaacagcggcgcaaatcagaacgattccacctaagatccaaggaaagtgatccgcaaaaaacgctccgacctgagcggcagacacgcccttgtggttcgcttctgtcccgatataggtcagaacataagtaacactttcaacaccctcgtgggtcacatcgccgatatactccgctgttgtaacatagcctgtagccgcctgataggacgctttcgcagagtaggtagcaacagcctgatattgagagggcatcagcgcctcacccacaagatcggtgccggtgacctgccactccacattggcaaggctcagggttctgccgttcttgatggttgtcgcggggacataggacatatcgttgcggtcaagctgtccgatggttttggtttccgtcaccgtgtagtttttcgtagcatagccggcggctacggtattgagactggtgtgatccaatgcgagggtaccctgaaatctgccgtcatcatactcgatggtgggcttaagctgctccagaatcagagcaaggtcatctttcgttgtttcaacggtgataacctcggtatgaatccgcttttcttccacgggattctcactttttacaatgtccgcaaaggtgtagagatacccttccagctcaaagggctcctcaattagtgccgcagggtcctgctcaggggatactgtaaaggttttgatcgcttgctgactgccgttgaggttttgaaccaccgtgtccgtaggcacctccaacgcaaaggcgttggaggtaagaaccagcatcagcagcacgcaggatattactcttttcatgtttgggagagcctccttctcaaataatttttgtgatgcgcattcctgccatacggtcaggcggtatgccagatacctgcttcatgacgctttctcctccttgatcttgtattctaccgcgcgctccggatgttcccgcagcgcgtcaagtattctgatagactgctccagcgcctgcattgtatcccgcttctgacgcttcacaaagccatgcaaaagcagaacatctccattgggaagcgtgcagaaaatgatgcgtatgagcactttactttttactcgcagctcccaaagatcccgatagcgctcgattgaaaatcgcttgaaatgtggttctttcatttccggcttttcaagctgggtcaggaaatacagccgcaggaggatcttctcccgcagccgcgggtcaagcccgtcaataaaatcggcgagcggagcggacttgcttgttggctgatagatcaggattcccttcatggctctgtcacctccattgcgtcgctcagcttcttcagatggcagataaagcgctctgcaaagtccccggcaagctccgaatcaccgctgatccaccaaatcggattgggaagcggctgagagagcgcgtcgtattgcagacagatcagcagaaacttttgccgtggttcggcctgctccgcagcttcatatagtctccgaaggatctctgtgatctcacaagaattctggcaagtgtcgcacaagtcatcaaacaataagccggaataggcgcggctcaaggcgttcaatgtggcttcgtccacacttccatctatcctcagaaggcccatacggtgcaaacgggccttcgccccatcgtcaaacggattttgcggtcgtgttttgtggaactgtatattcatttctttcatctttgtacctcacaatgggatagaaaaaggcccggcaccttgcggtgtcgagccttctggcataagtcttattattctttgtcatctgcttcggcttgcgccggcagcgtggtggcttcttcgatcatgctcacaaccaaggtgttcatctgcgcggcgttctgcgcagtaataaccggaacgccggtgcgctcctcaagagcctttcgtgctacaccggcaacctcaccgccctgtcgggcaacctccatactgccggaaaatccttccggcttggaggctttggaaatatcacgggtggacgcctcggccagcatagtcaagaccaattcggtatcgctcatgttgtctcgcaggttttcctttttcagccccttgagattcttgtactgccgcgtggtcatgccggaccacgtgcgggtgatctcatcggtcagaatcgcaaattcacgccccttttccacaccgcgtttctgccactcatcggtaagctcgtttcgaatgcggatagagagcagcctttgatgtacccaatcagggtcatagccctttttcagataggtttccaatgcgcggtcgatggcctgctccggatcaatggtttcctcaatgcgttccctgccgacctctgccagccaacgtttcaccggttccgcacggggggatgggatagactgaataatgcggagaagctgctcggttgtggcagcgtcggtcttatagttctttccatccgacgatttcattttcagttgtacgatattttcgtacaactgagttgccccctcagacttcaacttgcgcttcaagtcactccaatatctgcgagggttttcacttccagtcagtacatggattacatcgacaacagagaagtaccactcctcttgttcttcattccaagccgtgcgaatgggttgattttcaaaaagctgaattttattctgttcgctcatagcgttgctatcctttctctttcttttttcgattatacatcagccaattcgctgccgcaagaactccagaaacagctcttctaaatcttcatcgccgttcagtttgtccagataaggtgcaaatttcctacggtcaaaggcgattttcttaggtggtgcagcgcgacgcatttcctcgtctgcccgtgcctgccgccaagcctcatacagggcttggcactccgcagacggcggcggacagatatggacgatcttctgcatagcagccttattgagtgtgtatccctcaatggtgcacatttctacaaatgccctttgagagtctgcaccataatcggcaatgagttccgcacaggcaatcggcagcttgcgtggactgttctccaaaatatcagcaagcggcggaatcagtgctgccagcttgatggccttgcggatctcatactccgtcacaccgaagaaatctgcaacgatctttcgggcgttgtacctttggcgattctcgccaaaggtctcgccgtcgctatctccatctaacttttggcgagaatcgccagaagttgagttgcctgaagattccttcaacctttggcgattttcgccaaaggttggataggctacatttcgttgcccatttctgttgctctctataagcaacgctcgatacgctttgccccgttcaatgatggtgagatcctgccgccgcaggagattggtggcaaccgcaatggaaattgctctcgcgtcatcggcctccacaacctccgcaggaattgttgattgtccggtcagccgccacgcttcagtacgattgtgtccggcaagaatctcatactgctcactatttggaactgggcgaacgataatgcgctcatagatgccctgctcggcaagctgctgagagaatgcgcggagtttttcgggcgggtagggatgaaatccaatgtctgccgtgcgaaaagggcaaaggctgttgatcggcaattcgcaaaagcggggtactgccgcatctgcctttgcttgaaacatagtttcataagcctcattgcctacttccaactctgatgcttgctgcgctgcgctcatgcgccgctttaacaggtcatccatgctttttttagccaagccgcagcacctcctgagcaagagagcgataggagtcagcagcaggattcttaggtgcataatcgagaatgctcatgcctgttgccggacactccgcaaccttgatcgtctgctcaatggggcggtcaaatacatgaatgctgtcaccgtagatctcgcccacgctggagcgaacgctttggcagagctgcgggcgggactgatacatagtcaggagaatgcccgcaatcttcaaatcggggttgaatcgattctgtacattgcgcaccatttctaaaacatcgggaatcccttcacttgcaaggaagtgcgcctgcaccggaatgatgcagtaatccgcagcagccagagcattaacggtcaatagttcatgcttcagtccacagtcgatgatgatgtaatcatacagtccacacagggatgccaacagcttgtccagcaccttctcgcaagggtcatctgagatgccagatgcgttatactgtgaaagctgcatgacctgcaagcgggctgcagcgtccgctaaccgcttgttggcagggatcaggtcaaggccgctgctggtatgtagtacagcacgatcgaggtggagctccagatcctccggagagtcaatttggacaagcagcagctttgccagcgtattcttctgttcccccggcgtatagccgagggctgcggtgagattgccctgggggtcattgtcgatcagcaggacctttttatcttcagctgcgagggcagccgcgaggttcaaagcggtagttgttttgccaacaccgcctttttggttggtgattgcgatagtattcatgctcatttttgaactctcctcagcaattcgatgtgtttccttcctttacacggcaaattgtagtaatcttctgaagaaacaaaatccatcagtggaattttaggaaaatatgttttattaaaacatttcagagcaatcaatttcccagaatgtttccagtctaatatctgctttgggcgatatcccaaaatcgcgcatacctgcttttctgtcagcagatccggcagagaggacatttcctgctccacagccaaccgaatagcgccgcctaattcgcttgaatatggctgcggtggagtatatgggatacagttgtggcgcttgcccttgagatagtacaatggattctgttgacgatcagccaaatacctttcaacttcttcctttgcaattttgtatccaaatccttttcgtttcggcttctctgcggataccctgccggtttctatcaaccacaatgcagtttccttgcatatatgtgcaatttggtaaaattcttctttgctgatatagtctttttgaatatccgaaagactaagctgcctgtttttcatacccgcaccttcagccttctctccgcgtagtcctcgcttaatacatagtcaataatggactctttgaagatccagtagtgcggtttaatgaagatggcttttacaagtccttcgtgaattaactttcgagcaaagctatcgcctattcctcctaacatttcacgaaatgttagtacagacactacatcggggtattgcttgaattgttgtatatatctcttccttggtttttccatgatcgaacctccgtctaaattaccattgacagatgggttcgatacctaatagtatgattcagttctctcctaaaacttcaaaattcgtttgagttctctcctatgtccaccattcctcacgagaaaatgggttgtaccggagttctctcctagttctctccaaaccgcttttttgagctgtcaggagagaacaccaagacattccgtatttgcttaataaaaacacgaaaaagtcaaaaaagccagtaatatcaacgctttctgggaacggtggagtgcagattgctgcggaaaacagaatcgatataaccactcaaaatccgccgctggcgacagcgtaccggttcgagtccggtcaccggcaccaagagcagaggacctgcgccgcgggtcctctgctcttttctttgaacgggcaaaagaaaatccggatattaaagttgtggtcgtttggccggggcagtaccggagtgaggctttcctctgcgatcccactattgcacttgagaagatccgataagcagcattgtattcctcggaaaatctacaatgctgtgcgagccagtctgtcatcgcctttcaggccgcaatcaaagtaagaaaaagcacgcctgccaagcagacgtgcttttcgttttgtgtcaggggttttggcttttcagcgtcttccgccgaagccgcctccgcggccaccgccaaatccgccgctgcgacctccaccgaagccaccgccgcggctgccgccaaagccgccgaagctgccgcctccgccgaaaccgcccccgcggctgctgccgccgaagcctccgaagtttccgctgccaaagccgcctccgcggccgctgctgccgaatccgccgaaggaattaccggaaccgcccgagggccgtctcggctgctggggcgggcggcgattaccgccggaggagccgccgctgcgcggcggtctagggccgccctgtggaggacgggggccgcccgaatggggcgggcgcgggccgcgcgggggacggcgcccccagaagatggggtgatacatcaccgtcggaacgcccatgccgggcatcatgtagcggcggcgatagcggcgataacgcatgccgtcaagcatgatccagaggacaaagaatatgatgaggaccatgatgaacatcacaccgttggccgcctcgtccagcgccgcctcactctgctgatactgctggctcagctccacatggagcgcggcgcaaagcgagcgcaccgcggcgtcataatcgcccttctgcacgttatccgccatgcaggaggcaacaaagctctgcgaaaggccgctgagcagatcatagaaatcgccgcttgcgaccagataatagtcctgctgctgtttggcgatgacaagaatggcgtcatttgagccgagctgcatcgtgtccgcatagtcatacgccgtattctcgagattatccgacgactgcaccgtcacgacggccatgatgctgccaaacatcttgtcccagttggcgttgtagaggccgacggcctcctcagtcttgtcggaaagaacgccggcatcatcgcgcacatactgcgtaaaggccgccgtggaaagcgagggatcgagcttttccccgccctccggcgtagagacggcgggcgtcttgtgcagtccccacgcactggatgcgacgatcgccagaatcagcacgacgatggcgacaccgcgtttttgaaagaatttcatatgcttctcctatccggagcgtctcagcttctcagctccatgagcttctgcttcagctcaccttcgatgcggccgagctcgacctccgcttccttgcgcttctgcgcgccctcgcgctggatgttcacgacctcgtcgagcgtggagacgagctgctcgttcgtgtgctgcagcgtctcgatatcgacaatgctgcgctcggcttcctttgccgtggcgatggtgcccatcttgagcatgtcggcgttcttcttgagcagctcgttcgtcgtctgcgccaccgcgctctgtgcggccgtggcctgacggctgtgctccatgccgagcgcgagcaccatctggctcttccagagggggatggtattgacgagcgaggactggatcttttcgaccatcagcgtgtcgttgttctgcagcagtcgcgtctgcgggcccatctggagcgagaccatgcgcgtgagctccaggtcatgcagcttcttttcaaagcgctcgcacttttgcgcgtagtcgttataggcctgcgcatcctcggcaaggccgctggcctccgcctttttgcgcagctcctcgagctcgccggagcggacttcggcaaggcgcttcttgcccgcgatgatgtacatcgtgagctccttatagtacttgaggttcagctcatacatctggtcgagcatcgcgatgtccttcatcagtgtgacctgatgcttttcaagctcgctcacaatgcggttcacgctcgtctcggccttgccgtactgcgcgcgcatcagctcgagcttatccttctgcttgtggaaaaggcccgcgaagcccttcttctcctcctgaccgaagcccttgacctcgacgacgaggttcgagagcgtctcgcccacctcgcccaggtccttgttgcgcacggaggacagtgcattttcagagaacgtcgccacgctcttctgcgcggccacgccgtagttgagcacaaggttcgtatccgtgatgtcgatctttttcgcaaaatcgtcgacggctttcttctcctgctcggtgagcatgctctcatcgaccttgacgggctcgacttcctttttctccgtctcgggcgcggcgggcgcttcgggcgtgagcgtcagctcaggaacggcttcctgtgccgtttcggtggggttcagggtcagctcgggcatcatgttgtcgctcatatcatttctcctccgtattttggctttgagtttgttctttttcgtgctttttgatgcgctggatgcggcgcaggcacagcagcgtggccaacgcccagatcagcgcggaatagtaaagcgtatccctgtgcagatgcagcgcgccgataatgcttgccacacacatgatggcaaagattgcacagaagattgggtcgagccacacgcccttgaggcgcttcatgatccatgcgttcaccttggcgttgaacgccatcactttctttcgcatcgcttactcctttatagctcgagcttgatgtcgtcctgcgaggcggtcgccgtgccggactcggcatgcagctcaccgtcgtcctcactgaggccctcgcgcttcatcatgttctcaagcaccgtgatatcggcggaaatatccatcgcctcgctgccgaagagcatgtcgagctgcttttcaaaagccgtgacgatcgtgcccatcatactctccacgcgctgcatggtcgcgtcgatgttctcgccgctcacgccctgcgcgcccatacggtcataggcgttcaagagcttgagggtcgtgggcaggtagtagtccataaatttgcggatctgcggcagctttttggggtctgccttgacctgcgcgaagatcttcgcgctcaaatcctcgagccggtcgatgtcggcagagatcttcgcgtccttgatggaatcattcagacgcttcatctcggagatggcaagattgccgtcccgaatcatcttgtcaagctccggattcccggtggtctcctcctttttcggcgggtcaggcacagtgacctcgaccgtgccgcacacggcgttcataatgaagaacaccacccccgacacgaccgccacaaagaggaaatgcggtacgcggtagagcggaaacagcagcgcataaatgacccatgttcccgccgcggcgtaatagggtacggtggatctgcgtttgacagttgccaagacgatcccctcctgttttcataaatattttgactgatatatgatatcacatcgcatcagcgcggtcaagcaaagcaagcgcttgaaacattgcaatatcgcactttttacaaaagaaggcggcgtccggtccaggacgccgccttcttgcaaaatactgcgtttttcttattcgtttcggatggcttcgagcgccgagatcttgaccgccttgttcgccggctgatagccggacacaaggccaaccagcaccgagaacaccagcgcgaaaatgatgagctccggcttgatgacggaaacgcgcgtcacgttctctccgccgatgagcgcctgcttgatgagttcccacgacacgcccccgccgccgaacgcaccgaaggagaagagattgatgccgacggagatgatgaagctgaaaataagccccaaaacgccgccgagaaggccgatgctgcccgcctccatgaggaacatcgcgcggatatcgcgcacatagcagccgagcgccttcataatgccgatctccttcgtgcgctcggagatggacatgatcatcgtgttcgtgatgccgatggccgcgaccagaagcgagatcgcgccgaggccaccgagcatcagctcgatctggcgggtctgcttgttgagctcgtcgcgcatgctctgcatagaatacgtactgtagcccaagtccttgatggactgctccacatctgccacggcgtcgaggctctcagccttgacgttgatgcttgaatactcgaacttcgtgtcggtcttgccggtcaggtcctgaataagagctttgagcgcattgatgtccatcatcacgccgtcgctcgtctcatagccctttccctggtcctccttcagcacaccgacgacctttagctcgacctcgtaaggcgcgggctcggtgcccgtaccgtcgtcatacggtgtgagtaccatggtgatgctcgtcttgagcgggtcgaaaaacgggtcggggacgttttccgtgtcgatattgccgttttcgtcccaggtgtatcggtagacataatttctgccgtcaggcatgagcgtatcggtgaagttataggcaaaatactggcccacgaccacctcgtcgctgctttctgggtagcggcccgcgaccagctcataacccatgtcctcaagggcgctcgagtcaatgccggcaaaattgacccagttggccgtgtagcggccgttgatgcccgccttaaacgaaatgttgtaatcgtcgaggcttgccttgggcatgacggccttgacgcccgcgatctcatggaagctctcgaccgccttgtcgtcaagcttgctctccgtctgcgtgccggtgctctggttgtagccgcggtagacctcgatgatggagaggtcgcccatatttttgagcatctggtcgtaggactcctgcatgcccgcgccgatggagaccatcacgatgatggacgtgcagccgatgaacacgcccagcaccgtcaggatcgtgcgtcctttgcgccgtgacaggctgtcaaagcacattttcaggatgtctgcgaatctcattttttctgctcctcagcacccgtggccgcagtctctttgctttcagccgccgcggcttccgctgcctcctgcttctcctcggcgatctcctcttcgtcccacttgtcccacagcgcttgctcggccttctgcttggccttcttcttgcggatgcgcagcacgatgagaaggacgataagcgcagcaaccaccgcgatgatgacgtacttccacgggaaggtgcttgccggctcggggtcgatcatgccgggatcgtccatgccggggtcggccggctcgtaggccatggcctcgaccgtcgcttcaaagacgcgctctttcgtgttgccgttggaatcctcgtaggtgatgacgatcttgacctgattctcgccctccagctgcggggtcacggcaaaagcgatggtgccgttcttgccgccgtcgatcgtgccgacgcgctgatatgccgtcggcgtgtcgatatcgccggagatggtcgcctcaacgttgttgatggcgctctttcccttgttgacatagtcgatggtcaggctcgtctcctcgccgacgtagccggtgtaggagcttgtaggctcgctcatttcaaagcggtcgggctggtaaagaggaacgctcagcgacagcgtggcgttgcccgactttcttgcgttctggtcgacgtattcataggtcacgtcgatcttgacgtcctgcgcgctggcgctgatgagctgcgcggccttcatcggcacggtgacggtcttgctgccgctcgcggcgacggattcaaagtagaacgtgtttgtcgagccgttgagcatcaggtcttgtccgccggtgacggtgaccatgacgttttcgatcttgatggtcttgctggtgttcgtgaacgagaagctcaggttcgtactcgagcctgccgcgacggacgaaccgccatagttgtacttcgagaggatgacgatgggcgtggggctcgcaatggtctcctcgtccttcgtatccttggtgacggtggagaggacgttcacgctgccgctggcgctgccgccggtgagctgcgtgccgttgtcatagtagaacgacagcgtggcgtcaatcgtctgcatctgggattcgatcttgtcgagcgccttgaccgtcacggtgacagccgtgtcgcggcccgcgcggatatcgtcgagcatgtagtcctgactgcccatgatgagaagcgagccggaggatttgagcgtcaggatggggtcacgcatggcggtcgtgccggcgttctggatgtagacggtgacggtcttcgtctggcccgcggcgatggccgtggacataccgtcagagttgaaaacggcgcgcggctcggggatcgtttccggcgtcggctcgggctccggcttcggctcggtgtagggcacgcactcacgaatctgtagtttctcgttctgatagtgaccgttaccggatgcatcattatagtaaaccgtaaacgaaagctgcttttcgctcgcacccgtataagtaaggtttctgagcttaacagtataggtcgtaccatcgccactcgacgaggctgacgcataacaggtgctgtcgccctggaagctgtcgatattgcgaatcactcgaattgaattgccgtcggtgccgtttgctgtgcagtaaaggtaaagcgtgatatccacactgtcgcccgttgtgatgctcgacgaactgacatcgtaacctgtgaccataaaggctccgccactgctgccgtctccctcaccggcagcattcgccacattcacattcggcagcagcgccgcgcacagcacaaaggcaaggcagagcgagagcagggatcttgaaatgcgtttcatgttcgatttcctccgttattcgatgtaaggtgcggcgtcgatctccgccttgacctgattttctacgttgctgacgatcctgccgtcgatgagtgtgacgatgcggtcggcatactctgtcatctccggatcgtgggagacgagcacgatcgtctggtggaagcgcttggcaaagccgcggatcatgtgcatgacctctttcgtcgtccttgtgtcaaggttgccggtcggctcgtcggcgaacaccacctcggggtgcgtgacgaacgcgcgcgcaatgcccacgcgctgctgctgaccgccggacatctggttgggaaagtgatccatgcggtctttgagtcccacgcggcagagcattttcttcgcctccagcagccgcacatccgggtcgatgcccttgaacatcagcggcatggccacgttttccgccgccgtcagctccggcagcaggttgtaggactgaaaaacaaagccgatgtgcttctgccggaaggcggcaagctggttctcgttgagctgtgagatcggcacgccgccgatgcgcaccacgccgcgcgtgggcttttcgagtcccgctaactggttgagcagcgtcgatttgccgctgccggacgtgccgaaaatgcagcacacctcgccccgcgggatgtcgaggtcaatattgtgcagtgcgaccacgtgctcctgccccatcatgtacacctttcggagctttcgcaccgaaatgacgggcttctggtcatttgccatcgcagtttctcctcaattttaatcttgggtccattataatctcatcttatgaagaagtcgttacaatcaggcgcgatttggttacaaattatttaagagttccttaattctcgcgccgagcctctttcctgtattatttagacggaatttatcgaaaaatgtttcatcttttttgaaaaaaacggcggacttttttgaagtccgccgttttttaagttcatgccgttttagttcagcggcacgtcgggcacgacgtagaccgtcatctcttcgccatttgtgtcgatgggcagcgtgtcgtcgatgggctgcgtcagcgccgcgtcggcatagagaagattgccggtgctgctcacaaacgtgacataagtgccgcgcttgatggagatctcctgcgtctcctcgtccgccgcgccggggttatagacaagcgtcagcgcgcagacctcatcgctgttgaaggcctcggccgccagctccttgtccggcagataggactcgccatagctccaatcatagagcgtcgtgccgaggacggatgcctcaccgctctcatccttgctgtaatctgtcacggacttggcaagaagctcgcccgtcgcggggtcgacatagtagagggtcgtaaagtagtagtccggcatgtcgttgtaggtcgtggtggtcgagatcaccaccgcgccgtcctgctcgctctgctcgtcgatggtctcgaccgagccgtcgtcctgcaattcgccgcaggcgggcagcatcgcctgaatgtagctctcatactcgccgctcgggtagcagttcatattcaggcggccgtcgctttccattttgctgagatacacgccgtttccctcgatcgacaggcaggcctgagcgaagaattcatcctcgcccacggggctgtcggcggtgtagctgtagtgcgaggccagcagcaggtttcccttatcatcgcgcgtatactgcaccttggctgtgtaggtctctttgctgtcctggtcggtgccctgaatgctcacggtcaccgtgtcgtgatcttcgagcagcttttcgggaatgttgtccgcgcgcacctgctcgagcgaaatttccttcggctcgtcggcgtttttatcgttgttgttcgtgtcgccgccctgcgtgccgcagcccgcgagcaggctcacgacgcaaagcgcgccaatgcctgctttcttccagtttttcaccttggtttcctccttatttgggtgcgggctcgcgcccgcgttctaaagcttttttaacggttttcttccagcggtacgatgtagaccgtcgcgctctcgccgctcgtgtcgacgccgtcgtagaagtcgatgggcttggtcagctccctgtccgcataaagcgcgagatccgcactgtcgaggaagaggatgcgcgtgccatgcgccacgcggatctcgctgacgctccagccgttctccccggcgtcccagcccttctccgagcccggcgcgggatagaagtacgtcagatcgcagacgtcctccgtgctgtccgtcgaaaacagaacctcgttcatcacattgcgttctgcttgataaggctcgtcgtagctccagcggtagcgcgtcgtatgcagcttggatacctcgccgctttcctttttaatgtagtcggtcactgacgcctccagcacctcattcgtcgcagggtcaacgcggtagagcgccgtgtagtaatcgccatcggaagacagatagcgcgcggtgacggagagcagcagctcaccgtcctgctcgctgcagctgtcgaccgactgctccacgtcctcttccaaagcagggcatcgggggatcatgtcgagaacgtactgctcatactttccctcaaggtaaatgctcaggctcaggtcctcagtgctgtcgctctccatacgcgcggcatccatcgctccgttcgcctgaccccatagctcggctttgccgctggtgctgttttcggtgtactggcaatgataccaggccagcacctcatccacaacgcaggtgtactgaaacttcgccgtacgggtcacagcgtcattttgatcattctcctgcacggtcacggtcaccgtgtcgtgcttttcgagcagcgagcgctgatcgttcgcagcccgtaactgctcgaccgtgatctgcggctcatcggcactgtcgtcatcactcagcccgcagtcgcctccgcagcctgcaagtaagctcgcagcgcataaagcaacggtgacggctctcttccagcttttcatggtgtgctctcctctctcatctcccgtcagtcttgatcgacgcttttcacatagacggtcatgctttcgccgtccggccactcgatctcaggggtttgatactcctgcgtcatggcggcgtcgtagtaaagcatgacgcccttaccactctctggggaaaagtacgctgcgctcggcacggtaaagtgctgctcgtgctcctgcgcggtgcccgggtcccacacgagcgtgattttatgcttgggaacatcgtccgacagcatcagcgcgtagaggtcttcctccggttcataagggcggtcatagctgaacgtatagctccccgtggcaaagcaggtgtcttttccctgcaagtcttttctgtgccgctccgacttgatcgatatcaggtcatcggaggttggatcgacatagagccatcgcagcgagtagtcagtgtcatcgtcggtgatataatgtttgatcggaaacacgagctggccgtcctgctcatacggctcttcgacctccaccgtgataccgtcaccggccacgggcaaaaacggttcccgcgcggtactttcttcgtaccactcatccgttccgcaggcgatcacactggcaattcgagcgctgccgtcatcatttgttccagcgataatgcacataccgtccggcacttcatccaggcagacattcacgctataaatatcgtctgcgccgtactcatcataataccagccgtggctccagctttgtagccggccttcttcgtcgcgcgtgtactggtcagtgctcttgacgtcctgaccgccgttgctgctgtctgtgctctcccgtacaatagtcaccaccttgtgccgctcgagcagcgcagagatcttattcctctcacagatgtcttcgtaggtgatctgcagctcgtcggcgctgtcgtcatcgtcaagcccgcagtcgcctccgcagcccgcgagcagcagcacggcggcgagcgcaagggcgctcatcggtccccagcggttcattttatttctcctttcatcgtcttctttccatcttgattatgcggagcttttttcgttccgtacattctcttagacgagaaatctctcaaaaagtttcacccttatgatttttttaagaaactttttccccgtgcgagctcttgcattttctgtcgccgcggcatacaatgagggcacatttcacccgggaggggcgtttttatgaactatatcggcatcgacctcggcggcacgaacatcaagggcgcactcgtgagcgcagagggcgatatcttaaaggagcattctatcccgacgcgcgtcgatctcggccccgaggcggtcgcggggcgcatcggtcaggtcatcgcgcagctctctatcggcgaggacaccgtcggcggcgtgggggtcggctgccccggcacggtggacgacgcgagcggcatcgtgcgctttgcggcgaacctgaattttgtgaacttcgacctgcgaagcgcgctgcgcgcgcacactgcgcttcccatccacctcggcaacgacgcaaacgccgcggcgctgggcgaggcgctgttcggctgcggccgcggcgcggagagcactatcgtcgtcacgctcggcacgggcgtcggcggcggcgtggtgctcggcggcaagctcctgacaggctacacgggcgcggcgagcgagatcggccacatggtcatcgcggaaaacggcgaagagtgcacctgcggcagccgcggctgcttcgaggcctactcctccgccacggcgctgattcgcgacacgaagcgcaccatggccgcgcaccccgagagcctgctgcacgcgattgccgcggagcagggcggtgtcgacggccgcacagcgtttctcgccaaggagcgcggcgacgaggcgggcgcgcaggtcgtggaggactacatcgagcatctggcctgcgggctcacaaatcttgtcaacattttcttccccgaagtgctggccctctcgggcggcgtagcaaatcagggcgacgcgctgctcctgccgctgcgcgaaagggtgcgcgagcgttcgttcggctcgcgctatgccgtctcgcacacgcgcatcgagctctgcacactcggctaccgtgcgggcgtgatcggcgcggcgatgctcgcgcgcgagtgagcgtaaaatagcgcaagatatgataaggccctccgcatttctgcggagggccttttttaccggtagccgtcgggctcggccgagccttcgatcaaaaactgcacctcgtccacgccgccgagcgacaaaatggactgctcgagcgcgctcagcatcaaatcgcgctccgcctcgttctccggcagtgagacgttagccgggagattcagatagcacacgccgttttcgatgcgagaggagatgaccgcaaagtcctccggcaggagcgagacgagcgaatcgtcctccggcccctgcgcgagcgcttcaagcagcgcgttcacgcgcgtctggccctcgtagagcgcgagcgtctgctgctcggcgcgcagctcgcccgtcttgctgtcgaggaaataaagcgacacggtgatcggccgcaggccactctcacgcgaggaaagcagtgtatccgccgagagcagcacttgcgtctcgcggtacggtagctcgcgcccgtccgccgtgatgctcacagcgttcacattcggcagctgcgtcagcgtcagcgtgatgcagtagtcagcgagcgacaggtcgatgcccgtcaggcgcgcatactgtgcgctcaagtcgatctgcgcgcggcggcccgacaccttgagcgacttgagcgccgttccctccgggatgggcgaagagagcgacggctcgtcgggccctgcgagcagcgcctccagcagcgcgcggacacagtcttcggtctccatcgcgccgtcgagcgtcagacgcttttcctgcgcgcggatggcgtcgccgccgcccgcggagttgggatcgctgagaaaatagagctcgtagccgttctcgtccatctcctgcgcgtgctgggccgcgcaggcgcagagaagcgaaagcaggaggactaatgccgcagtcagggaaagatgtcttctcatgtctcatcccctccctctttgcagcgcggcaggcgcacggtaaacaccgtgccgccgccctcacgggcgcggacctcgatgctgccgccgcggcggcgcgccgtgtcggcggcgatggaaaggccaaggcctgtaccgcccgcggcgcgcgagcgcatcttgtccacgcggtagaagcggtcgaaaatgcggggcatgtccccatccggaatgccgatgccattgtcgctgacggtgagaaggcagtccttttcatcccccgcgagcagcagcttcacaaagccgccggggcggttatacttgatggcgttttccgtcaggttgtagatgatttcgtgaatttcatcctcgctcgcaagggtctgtccctcgcggcgaatttcatatgagaggtcgacctgcttttcctcggccacaaggcgcagcatgcgcaccacgcgcgccatcacggacgagaggtcgacgcgctgcgcctcgggcagcatgccgctgtccaggcgcgtcaatcgcagcagattttccgtgatgcgcgccaggcgctcggactcctgctcgatatcgccgacgaattcgcgcacggtctgcgcgtccatgttctccgtctgcaaaatggagtcggagagaagcctgataccggccagcggcgttttgagctcatggctcgcatccgacacgaagcggcggcgcgcgtcctccgtcgtttgcaaccggtcagccatgtcgttgaactcggcggcgagctcgctgatctcgtcgtgcccgccgacctcggcgcggtggctgtacgagccctcgcgcatcttgcggatggcgtcggtcagtacgccgaagcgccgcgtcagcacgcgggataagagcacgctgatcccgccggcgaacaccagcacgaccgcggaaatggtcagaagatttcgctgcaaggacaacagcagctccgcttgctcggtgtcgtattcgtaggcgtagaccgcgccgatggtctggctgtggtagatgaccggcgaggccgcgcggcttttgaacgccttgtccgaaaattcggtgtagaaaacgtcctccccgcgaagcgcctgcacaagctctgtataaaaggcgtagcggccgatcgcgccgtcggtctcgcgcgtgtcatacagcacgcggcccgaggcgtccgtcacgagcacgcgggagatgcccgtctcctccacgagcgtcatcgcgcccgcgacgttttcctcgctcagctcctcaaggcccgaaagcgccgtcaccatcacggagacgctgccctgcagcgagctctgcttagagcggaacgtcaggttttccgacgtgatgagcggatacgtgttcagcaggatcagcaccgccagaatgatggcgatatagctgaagctgaattttcgctgcaggctcgcatgcatctgcacggcgctgccccccttctctttcttttagtggaaaatcagtccttcaagtagtaccccacgccccatttggtcaggatgtgctgcggcgcggcggggttttcctcgagcttttcgcgaagccgccggatgtgcacatccactgtgcggtagtcgcctgcgtaggtgtagccccagacgaggtccatcagattttcgcgcgagtaaacgcggcgcggattcttgacaagaagctcgatgaggtcgtactccttggccgtgagctcgacgatctcgccgtttttgacggcgacgcgctgctcgggggcgagcgtgatgccgcccgcggtcaacaggagcgtttcaggctgcttttgctgcggtgcggcgtttgcgcggcgcagcagcgcgcggatgcgcgctttgagctctaagatgttgaacggctttgtgatatagtcatccgcgccggactcaaggccgatgatcttgtcggcgtcctcgctgcgggcggtcagcatgatgatgggcacattggaaaattcgcggatgcgcatgcaggccgtcagcccgtccacctgcggcatcatcagatcgaggatgatgaggtcaaacccgccgcttttcgccatgtcgatggcggtcgcgccgtcgtaggcggtctcgaccgtgtagccctcgttttccagattgaatttcatgcccttgacgagaagctgctcgtcgtcaaccaccagaattttcattgccatcctcctccgtgaatgtgatctccgcgcggaagccctcgagcttcgcctctccgatgcccttgacgttcaaaaggtcctccgccgccgtaaaatcgccgtgctctgcgcggtagtcgatgatcgcctgcgcgagcgacgggccgatgcccgtcagcgtttcaagctcctccgccgtcgcggtgttgacgttcacaagcgtcacaacgcgcgtgggcgcggtgatctcgtcggtcttgtcctgcgtcgtcacggtgtaattcccgtgcgaggcgccctcgtaggccgttttgtgcagaaaaacgagcgaaacggcgaacagcaccgtcagcgcggcgagcacaaggtagacgccgctgactttggttttcttttcttccttttccacggttgcgctcgcctgccttttttgctatactgatgtcgaagcgtgccgaacggcgcgctcctcttcactgtattctatatttgattgtatcatacaacgaggtatatttccatgaaaaaacgccgctggttttcactttttttatcctttgcgctcctgctcccgctcttttcactgacgagcgccgacgcctatgaggacttcacgctcgacgcgaaggccggtcttctcatcgaggctaacacgggcgaaattctctacgagaaaaacgcccatcaggagaacttccccgcgtcgctcacaaaggtgatggtcgcgctgctggtgtttgaagccatcgacgagggcaagatcgcgctgaccgactccgtcactgcgacggaatcggcgttcgaggggctctccagcgacggcagcacggcgaacatcgtccccggcgagacgatgacggtcgagcagctgctcaactgcatgctcatcgtctcggcgaacgaggcgtgcaacattttgggcgaaacgctctacggctcggtcgacgcctttgtcgcgcgcatgaacgagcgcgcgacggagctcggctgcgaacacacgcatttcgccaacgccacgggccttcacaattcccagcactacacgaccgcgtgggacctctacctcatcacgcgcgaggcgatgaagcacgacaaattcatggagatctgcaactccaagagctacaccgtgcccaccacgaacatgaccgacaagccgcgtgagctgcattcgacgaactttcttatttccaactggcgcgcccgcggctatgtgtaccgcgacgcgcagggcatcaagaccggctccacgcccgaggcgggctactgtctcatttcgtctgccctgcgcggcagccgccacatgatcagcgtggtgctgggcgcggagcgcgtgacgctcgaggacggtgtgaccatccagacgcgcagcttctccgaaacgtcgcgcatgttcgactggggctttgacaactttgtcctccgcgacattctctcctcctccgaccttgtgcaggaggtgcccgtcgcgctttcgagcgaggcgagctacgtttcgacccacgcggcggaggatatcgcctgcctgctgcccgacaatgtcgagcccgacatgcttgagcgcaccgtgacgctcacgaacgacacggtcgacgcgcccgtttccgcgggcgacgtgctcggcaagctgacgctctcctacaatggtaaggtctacgccgagacggacctcttagcgctgaacgatgtgtcggcctcgtggttcctgacggcgcagcgcagggtgtctgactttttcgcaaagccgctcgtccgcattctgttgatcgtggtcgtactgctgatcgtcgcgctcgtcgtctatgtaacgatgttctcccgccgccgtcgctacggccaccgccgccgcggcgcggcacacggcggctaccgcgggcggaggagaagattctaagtacttcaaaaaagcggtaaagccgcttttttgagaaaggccacactccgctttgtgccttgccgccgctggcggctgcgacacgcgcggagcgagaggtgtcgatcgccacgcgccggtcgcggcgatcgacgatcaaaattctttgcgtctgcgaacgcaaaagcaaaaataaagggacgcgaaagcgtccctttttagtttagcgtgaccacattgtttccctgcggaaactccacaaagcggacggagtagaggtcggctgtgatgtaggcgctgcgacccggatgatagatcgtgatatagtcgctgccgacctccttcagcgtcccagtggccacaaccgtattctgcgagccgacgagaaagctcacgatgaccggccgaccgatgttgcgcgcaagcattcccttccacgaattgtattccatcttgtcgacggtctgcacctcttcgatcttgtcgggcgaggggcggaagtgtccgttcgcgccgcccgccggcacgatcaccgccgcgcccgtcggtcctgtcagcatttcctcatagccgaggctcatctcgctacccttttgctgctgcgtgcccgccgcggcgggcacagcggccatctcctcataaaggcatggcatgctttttcccatctggatcataaaaacgtcctctccctttcccgttgctgctgatttgcttttctcaggtgtcgtaatacgcggcggtgggggcataaaagcagtggtcgccgatgcgcatgacgaatacccccacgccagagggaaagttcgcccggcaggacggcgaaaaggggttaaaaaaccacatcgcctcgccaagacccgaaagccggttgcccgcgatggcccagtcggcgatctcatagtgaatatccgtcgggcgcatattgtagatattctgcgggttgtagctgccgcgctccacctcgctcgcgcagacgaactgccccggctggaagatgatcctgcggatgctgccctgccccacgcgcgcgtattccccgcctggggcgcgcacgcggttcatcaccacgcccgccaccgccttcatgccgttttcgccctcgccgcccgcctcgcactcgataaggcgcgcgagcagctccctgtcggaataggccatgtcgatctcctcccccatttcttcttcctcgccagtctatgcgcctcccgtgcgcgaggaaccaaacacgcgcaaaaaaacaccgcagatgaatttcatctgcggtgctttcgctttgttcagttttcctcgtccggcggcggaagctcttccgcttccggcggcgtcgcgccgtaggcgcccttcatcttgagctcctgccactgctctttcgtgatgagcagctggcggggcttcgaaccctcaaacgggcccacgatgccgcgcgtctccatctcgtcgacgatgcgcgctgcgcgcgaatagccgagtttcagtctgcgctggagcatcgagacggacgcctgaccggtctccatgaccacgtcgatcgcggcagggagcagctcgtcgccctcgtcggcggcgttctgatcaggcgcggcattgctgccgcccttgccgctgcctttctccttttcggcgacggcagcgttgatcttgtcgatgacggattcgtcgtagtccgtctcgccgttttccttgacgaagttgaccacgcgctcgatctcctcgctcgagatgaagcagccctgcacgcgcttgggcttgccttcgcccagcggggcatagagcatatcgccgcggcccacgagcttttccgcgcccgcggtgtcgaggataatgcgcgattccatcgcggaggcgaccgcgaacgcgatgcggctcgggatgttggccttcatcaggcccgtgatgacgtccgcggacggacgctgcgtcgcgatgaccaggtgcatacccgcggcgcggcccatctgtgccacgcggcagatcgactcttcgacctccttcgccgcaacgagcatcaagtcggccagctcgtcgatgacaacgacgacgctcggcagctttttgagcgtttcgtccgtctccgccaccttattgtaggaggcaaggtccttgacgttgtgctcggagaacattttgtagcgcttcatcatctcgtacacggcccattgcagtgcgcccgcagcctttttcgggtcggtgacgacggggatgagcagatgcgggatgccgttgtagggcgcaagctcgaccatcttcgggtcgaccatgataaagcgcacctcttcgggcgttgacttatagagcatcgagacgatcagcgagttcgtgcacacggacttaccggagcctgtcgtaccggcgatgagcacgtgcggaagcttcgagatattcccgacgatgttcttgccgctgatgtccttgccgacggcgaaggccgtggtggaaggatgggtggtgaactccgtggattcgagcaccgtgcggatgctgacgggcgaaacgagcttgttcggcacctcgacacccacgacggagatcttgtcggggatgggcgcgatgcgcacgccgctcgcgcccagcgcaagggcgatatcgtcctgcaaatttgtgatcttcgagagcttcacgccctgactgagcgtgaactcatagcgcgtgaccgacgggccgcgcaccacatcgcccggctgggcatccacgccgaagctcgtgagcgtctgcgccaagcggcgggagttgttgcgcagctccgcgcccgcctcggcggcgttcgtcacgctgccctcttttaagagcgtgatgggcgggtactgatacgcggagggctggggctgcgcgtcgctgccctcgatctcgcgcgtgacctcctcgcgcgcggcatcgacctcggcgcggcggagcttatcctcctgcttgtcggtcagcacggcgggagccgcggcggctgccacggttgctgcggtgacgggcgtgctctgcacgctcggcgcgggtgcggcaaacggtgtgtgcgtaatgggagcgggcgtcgggacgaccggcgcgggcgcgctcggcgctgtatcaaacggcggcaggtcgaagtcgtcggcctccaccgtcacaggcttaacgggtgcggacggcgcggcggcaggcgaaacgggtgcagcgatttttgtctccgcggcacttccgcccgctaacagctcgtcggggctcttgatattatcggacttcttgcggaagaagccgcccgtgggatttttcctgatgacgcgctcctcgccgtcgagcggaatgtcgatggcggcgtccggcgtatggaccggcgcactgcggcgcggcacatgggtgcgctgcggcggaaggtcctcttcctccactggctcatagggcacgcgctcgtgcgagcgcacggcctcgatcacggcggcaggcgtcaagcggaacgccatcatcaaaaacgcgacgaacagcacaacgagcaggaccatcgccagcacctttttcaccagcagcaccagcatgatcgcaagcgacgcggacaccgcgccgccggactcgagcgcgttgccgctcgtccacagaagcttcaagatgccatccatgttgacatactcctccttgcagagggcaatgtgcatgatcgcgccgaacacaaccggcagcagtgccgtaccgacaaggcaggacgcgacgttccgcccacggtggaagagcaggatatagctccccagcagcagcgcgggcgcgacgaggtaatagccccagccaaagagcgaccggcacagcttcgccggctgatcgagcagccacgcccccgactggaaatagctaaagcccaggcacagcgccagcaccagcaggatcgcgcccgcgacctcgcggcggatggggcgcttttgattcttcttcgccgtgcgcttgccggaagacgaggagcgtgttgagcccgtcgttttctttttcgttgtggtggtttttttcttctgttgtgccatgattcacctcagaatcaaaaattagtgcaggatcgtgagcaccagcgtcagcacgccggcggcccagcagtaataggcaaacgcgccgaaacggcccttgtcggcaacatagcgcagcaggcggatgctcgcatagcccgacaccgccgcgacgacgacaccgacgaggtacacgggcacgctggagaagtcgatgcccgcttcgaacgcgtccttgagcgtcaggatgttcgcccccaacaccgcggggatggagagcagaaatgcaaagcgcacagcgaacttgcgctcaaagcccgtgaagcagcccgccgtgatcgtcatgccggagcgggaaatgcctgggcacagcgcgatggcctgaccgataccaacgagcagcgcgtcgagcattgtggcggtcttttcggtcttgcgtccatggcgcacgcggtcgctcgcaaagagcaggatgcccgtgacgatcagtgcgccgccgataaagtacatattatcactcagctccgtgaaaaaacggcgaaacggcaccatgacgaaaagcggcagcgtgcccacaataatgagcagaataaggcggcgcgcaggcggcacggggttcggcgtgcgatgatgggcaaggtcgccgatgccggtgaaaaactccacgatcatatcgcggatatcatcccagtaagcggcaaacaccgccacgagcgtgccgaggtggagcagcacgtcgaaaaagtcgggcacgttgctcgcgccctgcatgttcagcaggtgctccgcgatggcgagatgtccggaggacgagatcggtaaaaattccgcgatcccctgcacaaggccgagaacaacggcggtcaaaactgacataaaaaacaactccttttgcgttttgttctgtaatggcaatattctaacaggataattatagcacgcttgttcgcggaataccaccccgaattgccgcatcttctttttctttcctttttcggcacatcccttgcgaacgcagggtgaatgtgctatgatcggtgcggactatcagaaaaggagagatagaaatgacctataactaccgcaccaagggcgtttgctccaaggaaatgcacattgagctgaacgatgaccacaccatcaagagcgtggaggtcatcggcggctgtaacggcaacctccagggcatttcgcgcctggtcgaaggcatgaaggccgaggatgccatcgcgcgcatgcgcggcatccgctgcggcttcaagaatacctcctgccccgatcagctcgccatcgcgctgggcgaggcgctggcgcaggacaagcagtaagccgtcattttctgcccgcgcggtgcatcgcacgggcaaaaatgcataaaatcctgcaaaatgccgtttccctctctggacaaacggcgctaaactgtgtatactgttaaaaaataagcattcaacgcactatcaacgcaaaacatttcgcttttgccggtctgacgggggaacttcatggacattgatatggatatcaaagagctcgaagcgttcgtctacgtggtggaaaactgcagcttttcccgcgccgcggagctgctgcacctgacgcagccgaccatcagctcgcacgtctccgcactggagagaaaactgaatatcaagctcatcgtccgcaccacgaaggagacctacccctccgacgcgggcaagctcctctacaaatacgccaaggagatcttacaagtgcgcgagaatgcggccatcgcgctgcgcaacttctctcaggagatgaagggtacgatctccatcgcggcctccacggtgccgagccagtactatctgccgcaccttttgcaggacttccgcgcccgctatccggacatcaccttcaacatccagatggaggacagccccaaggtcgtggagctcgtcgccacgcgcagcgtagagatcggcttctgcggcacgatggtggcgagccacaaatgcgtctatcaggattttgccagcgacccgatggtgctcatcacgccgaacaccgaaaagtatcaggcctttgcgggcaagcccttccccatcgagcagctcaaggaagagacgttcatcagccgcgaaaagggcagcggcacgtatcaggcgggcaaggagctcttaaatgagctcggcatcgacatcgcccagctgcgcaccgcggtcgagatccgctcgaccgagagcgtcaagcagatggtcagcgagggcttaggcgtcggcctcatcgcgcagagcgccgcgcaggactatgtccagttcggcaagctcctcgcctttcccttccccgactcgcgcttccgccgccagctctatatcgtcaagcacaaaaacagcattttgtcgcccatcgcgcaggtgttttacgactatgcgcgcaaggcaaaggacaagtccgccgcagagtaaaaaagaaaagcatccgctcataaagcggatgcttttttacagggaatcggcgtttttttatccgcttttttcacgaaattgtcatttacattttctccgctctggtatatgatattgcaataggtcaacggctgcgctgcaccggtaaagcagcaggccttacgggagggaaagcaatggactgccgcgattccgcactgtttacaggcgtggacgaagcatcgtgcgaaaatatgctgcgctgcttcagcgcgtatgagcagcgcttcagcgcaggacagactatcctcacctgcgggcaacagcaggacatgatcggcgtgctgctctcgggcagcgcggcgcttctacgcctgcacgccgacggcaaccgcaccgtgcttgaaagcatggacgagggcagcgtctttggcgaggagctggcgttcaccggctttcgcgacggcagcgcgctcatcgagtgccgcgaggactgccgcgtcatcttcatgcgctatgaccaaatcacaaagcgctgcgaaaacgcctgcgcctgccacagtcaggtcgtaacgaacctcttccaactgctctcgaaaaagtctctgcatctgagccgccggatcgaggtgctcgcctgccgctccatccgcgaaaagctgctgtgctttttcgagcagctcgccgacgagcacggcagccggacgttccccctgccgttttccctcagcatgcttgccgactacatcagcgccgaccgcagcgccatgatgcgcgagatgcgcaagatgcgcgaggaggacctcatcagcaccgagggccgcagcgtgacgctgctttagttttttgcaagtatttttcgtaaatgcaagttttcctgcatcgtcagaatttcgacattcattgacgcaagaaaactttcatgatataaatatagcatcattccatattcccggcgctgcgtccaggaatcccgcctgccgttctccccggacggcacggcactgaatctcaacaaaaaggagaatcattcatgtatcgcatcgtgaagaaagaagcgctcaagcccaccgtgaccctctacgagatcgaggcgccgatggtggcaaagaaggccgagcccggccagttcatcatcctgcgcgtcgatgaaaacggtgaacgcatccccatcaccatccacgacttcgaccgtgagaagggcaccgtcaccatcatcgtgcagacgatcggcgccaccaccgaaaagctcagacataaagccgagggcgagtacattcaggactttgtcggcccgctgggccgcccgaccgagaccgaaggcaagaagaaggtctgcgtcgtgggcggcggcgtcggctgcgccatcgcttaccccgttttgaagaagttccacgactgcggcgcggaagtccacgcggtcgtcggcttcaagaataaggacctcgtcattcttgaggacaagttccgcgcggcgtccagcgttttgaagctgatgacggacgacggctcttacggcgagaagggtcttgtcaccgatgcgctcaaggagctcatcgacgcgggcaaccagtatgacgagatcttcgccatcggccctgccatcatgatgaaattcgtgtccaagaccaccgagccctacggcatccccaccaccgtttccatgagcccgatcatggtcgacggcaccggcatgtgcggcggctgccgcctcaccgtcggcggcgagacgaagttcgcctgcgtcgacggcccggacttcgacggtcacaaggtcgactgggacgagagtctcaagcgcggcaagatgtacttcgactgggagcgccacaaatacgaagagacctgcaacctgttcagcaaggaggttcagtaatatgcctaacatgagtctgaagaagaacgaaatgccctcgcaggagcccaacgtccgcaacaagaactttctggaggtcgcgctcggctataccgaggagcaggcgctcgacgaagcagcccgctgcttaaactgcaagaaccatccctgcgtctccggctgcccggtgcaggtcaagatccccgaattcatcaagaagatcaccgaaaaggactatgagggcgcctatcaggtcattcacgagacctcttccctccccgccgtctgcggccgcgtctgcccgcaggagacgcagtgcgaatcgaagtgcatccgcggcatcaagggtgagccggtcggcatcggccgcctcgagcgttttgtcgccgactggcacaacgcaaacgtgcaggaagcgcccgccaagcccgtctccaacggccacaaggtcgccgtcatcggctccggccccagcggcctcacctgcgcaggcgaccttgccaagaagggctacgacgtcaccgtttttgaagcgctccaccttgccggcggcgtgctggtctacggtatccccgagttccgtctgccgaaggccatcgtgcagaaggaagtcgacggtctgaaggccctcggtgtcaaggtcgagacgaacatggtcatcggccgcgtcgtctccatcgacgagctgatgagcgagtacggcttcgaggctgtgttcatcggcagcggcgcgggtcttccgatgttcatgcacatccccggcgagaacctctgcggcgtttactccgccaacgagttcctgacccgtatcaacctgatgaaggcttataaggacggctccgacacgcccatcatgccgcttcagggcaagaaagtcgccgtcgtcggcggcggcaacgttgcgatggatgccgcgcgctgctccaagcgcctgggcgcggacgtgtacgtcgtctaccgccgcggcatggaagagctccccgcccgtcacgaggaggtcgagcatgccatcgaagagggcatcgtcttcaagacgctcaataaccccgtcaagatcaacggcgatgagaagggctatgtctcctccatgacctgcgtggagatggagctgggcgagcctgacgcctccggccgccgccgcccgatcgaaaaggtcggcagcgaacacgatctgccggtcgactgcgtcatcatgtcgctcggcaccacgccgaacccgctcatcaagaacaccaccccgggccttgaggtcaaccgcaagggcggcatcgtcgtgaacgaggccggtctcacctctcatcagaacgtctacgccggcggcgacgccgtcacgggcgctgccaccgtcatcctcgccatgggcgctggcaagctcggcgcgaagagcatcgacgaggcactgagcaaataattttcgtcagcgaaagcgcgcagaagcgtacttctgcgcgttttctcaataccatttctcacgaagggagaactattatgaatctttggcatgatattgccccggcgcgcgtgcgccccgaggactttttcgcggtcatcgagatcgagaagggctcgaaaaacaagtacgagatggataaagaaaccggcgcgctgcgtctcgaccgaattctctacacctcgactcactatcccgccaactacggcttcatcccccgcacctgggcggacgacggcgacccgctggacgttctggtgctctgctctgaatgcatccgcccgctgagcctcgtggagtgctaccccatcggcgttatttcgatggaggacagcggcagtctcgatgaaaagatcattgccattcccttccaggatccgacctacaacacctatcaggacatctcggagctgccgaaccatgtggcaagcgaaatccgccacttcttccgcgtctacaaaagcctggagggcaaggagaccgtcgtcagcgacgtcctcggccgcgaggaagccatcaagatcatcatcaagtgccagaacgcttatattgaaaaatattgccgttaaagcaaaaaagggaaaggctgacggcctttccctttctattttgtcagaagaaggacgcattctttgaatgcgtccttcttgtttcttatcgcaggacgatagcccttactcattttggctggttcagcccagttccgcaaagcgcatcagcatcgtggcgacctgcgcgcgggtggcgctgccctgcggggccagcttgccgtccatgccattcattaggccggtagagaccgcccactgcatcgcctcgactgcgtaactgctgacacttcccgcatcggcaaacgcgctcaaatcggcggttgcgggagccttgaccatgcccttgctgacggcgtagcgatacagcatcgccgcgagctgctcgcgggtgatcgtgccgttcggcatcgtgccgtcagacacaccgtttgcgactgtccactgctgcgccgccgcgtaccattcgccgtcggacgcagtgtccgcgccgctcatgcgggcgagaatggtccagatcatcgcacgcgaggtcgcaaggttcggctcaaagcccttgccggtgccattcatcaggccgttcacggtcacatatttgacggcgctgtagtaccagtcacccggcttgacgtcgttatacggattgacgaacgcctccgcttcgccgaattctgccttgaccgtgaccttgccctcgggcatcacgaagctaaacttgccgttgccaaggtccgtcagcggcagggagttgccgctcttgtcgaggacctcgaggtccttgagcgtctgacccttatccggggtgacagtgatggtcactgtggagcccttgaccggatcagcaggggagaccgtgaccgtgccgtttgccggacggtcgacgctcacgccgccggttgagccggtggtcgtcccgctgctgtggcgtgcgcgcaccgtcagcgtgccgttttcggtcgtaagctcatatttacccgtatcgtacgtcgcagaagcaacgacgatgtcgtaggtaccggccctgttcatcgggacaacaccctccggggcactgacgcgcagcgtgacatcgctcagcatctccttgcccgcctccagcagaccgtcgaccttgtaggtcagctcaggctgctgcgcgccgacataggcggtcttgtcctccgccgtgatcgtcagcacgcggtgggcgacggtcacggtgaccgtcgcagtgcccttggcatacgtgtccgtttccgccgcggtgatcgtgaccacagccgtaccggccttgagcttgtaggtcagctccttaccgctaattcgggcttcatcgaaaatcatattgttggctgctggagttccaagcgtcaccttaccggcgttatcagggatcagagaagaaagatcaacgctggcagtgtcgccatacttggtatccttttcactttcctttgcacctgtatatgtcgccttatcgatcgtgatcttaccgtccttgaattcgccatttgccagcgtgtagttcttcacggtatccttaagggtcacatcgacggtgacggtcttgtccgtgccagcgtcggcatcagccatcataccggtcacagtgtagtccgtcaggttctcaccattctgaaggccatcgaacgtcacggacgtgaccttcacagctttctccccatcgtaggcgcggctttcaagcgtaacactcttgatcgtcagccctgcgggcgcgatgcgccattccttgctcacttcgtccgtatagttgccctgaccggtgacggtcacggtgcaggtacccgcattcttttcggtattgccggaaacggtgtagtccttaccgaccgtcagcgtcttgctgccgtccttgacctcataacttaccgtctgctctttaccattattaagtataggtgccggaaacggtcagcatatccttcgcagtcacagtaaccgtctcacggtacagctctgtgctgttccagtagaagatgatctcctgctcaccagcctcagtgtaagtcaggctcgtgtcgtccagtttggcgttgccgctgacagtcagcgccgcgggagcaattgcggagaggaaatccgcaatcggagtggagaatgtgccgttggtgaccttggccgtatccagagtaataacgccagccgaatcagcctgatcccccaagcccttagtcaccttatccgtcttgaggtaaagcgagttttcacaggttacggccgtagtagtggtgtgtgttaccaatccgccagccgcgtaattacctgtgccagtcagttcaccgccgttagcacaattcctgattgttgcctgcgtagcattcatgttaccgaccagaccgccaacatagctggtagttgttagcttggcgaggttcaggcagttttccagaataatctgcttgttgccgccggaattttgaatttcgccaaccaggccgccgatgatcgtaccgttcagttcggtcttgttcgtataatttttgattgaaacagaatacgacacactggttctgccggcaataccgccttcgtaaacgacaccgctcgaactgttcgcttgacagcgaattcgccctccataacggtagtctcatccgcgtaaagccacttatcagatgctgctgttgcgtctgtgctgaaacctgcccagccccgccagcgtggatagaagcaatagcctttgcagagatagtgagcgcgctgtctgccttattaaccagcttactgcctctcagatcaagactgccgacggaattgtaaccaatcagaccgccaatattgatgccgccgctgctgcttgtattttctgcattcaatgctgcgttttcgccgaaagttacggtgatcggatccggcagagtaccaccgccaaagccaccgcctacataaaggttatctacagcaacggatgcagtcagcgggccatttacttccgcagaaacactatccataatcacattttaaggaggaatctatgtatgccatgggttattacaaacgacaaattcttcgtccgcagcgacaggcggggatgtgcaacccccatcgtggataagcgtcgcgcaaaggtgttcgatgagcgcttcaatgcagacgaattcctgcgcagcctgccaaaggcgatgaaaaatctcggatactatgtagcccctgaagatgcgggagttgaaatgcggtccatcgcctcgcaacatcctgaagtgctttctgagcccagacgagatctggacctgattgaaccgggttactatctggaatccatcggagcatttcgtggattcattcaggacattcaaaaggcacgacctaaactggaggaacagcagatccacgccgaaatggagatagaggatcttctgcacgcggcagagttctatgatttggcctgcgatcagggctttgatatctaccagcgcctccgtgaagcacggatacggcgtcgtaattgcaaaaacgccgtcgcttggattgacttcgttttagatgccaatcccgatgagtttctgcgccacgatccatcaccgcgtatcagcggaacgcaacaccggcagtatcgccccagggcgctgcctgagttgttcgaggaactgagcagtctttcataaaaaagcatctccaatgcgatactgcattggagatactttcgattacaggcatattgtcatatagggcgggacacaaaggatatcatctttctcaatgagattgcgcgggtgaataatatagcatccgccaatcctgctcttgtatttttccttgaagcgctttagagattcaaaggaatacttagcgctggacttcacttcgatgggatacatcttgtacttcgtcttactgttattggcgataataaagtcgatctcaatgtcatttctgcgcttttccgcattgtactgggtatagaagaacaggcggtgtccattagaaaccaacatctgtgcaatcacattctcgtaaagcattccctcattcagtccgagctttcctgcaaagatctgcttgtaaacctcgtcctccagaagttcgttttcgtcaaatgcatggctgacaagcaatccagtatcacctaaatagcatttgatgtaggtatccgactctgtgagagacaggccaacattcggatcactgacgcgcctacactcgtttgcaatcatggagttcgacagccagaagaaggtttcttcatattgatctgccatagagccttctacgattttgttgaagacaactcgtttttcatgtctggacagcaaaccggggatctggtcgaaaatagccaaaaccttggagcgatattgtgctttgattttcatgatgtcattgcggtaaagctccagaatatcccgcttttcaacatccgattttccaaagtctttttggccttcaagaaaagcaacaatgctcatgggcataccgcccaccagcaggtattgcttgaacaaaagcatggccttattgtgcatacttcgctccagagggactctcttctcgaaacaatctctgatatatgggatcagcggcgcttcgttaagtgcccagcagaattcctcaaaatccagcgggtacatcttgagatgccgttcttctgaaggaatcacaatatcctttacattttcttcgattgagatcaaagaaccggtttcaaggaaatcataccgaccatctgccaccaaatacttgatcgcttcgcgtgctttggggaaaagctgaacctcatcaaagataatcgcactttcgcgcgggtagagctgtacgccgtattgaacagacagtagcatatagaatgtgtcgagatcattcaaatgcagttgaaaatagctcttgacattttcaggggcctttgcaaagtcaatgaggatatagcttttatattcgtttttggcgaattcctcgactacggtggattttccaattcgacgagcaccttccaccaacagagctttctgcccgttagcctcctgtttccatgcgagaaacttgttataaatctttcgtttgaaaagcatgtgcatcacctcacagatagaatagcacatctcccgataatccgcaagtttaatatagcaacattttctgacaatactcatgtttatgaagactgtaattttcgataacccgcaggtttaagggcgtgcaatgtagtagtcaagaaaagtagacacgacaaatatttatttttagtttactttttcaaaagtagagatgaagaacatttttgcggaagttgctttttcaaaagtggacacggacaacaatttttgctgaaatcctttttcaaaagtggacacaacgattcaatgccttgtaaggcccttgtttgcaagggatagtagttttggatagagtagagcgacaaaatcaaaagtagacacagcacagggttatttttctgtatctttccgcttttgcacgaatttgggttcttcggtcaggatgcgctttgaaaaggtatccttcttttcaagctcacctcgatagaaacgcttgcagtagttatccggtgtgtcatagccgattgcaaagcagggacgctgccggttataaaagtcaacatagcggcacaggacatctttcacggcatctctcgtacggcattcttctaatcgaaaatcgatgaatagttctttttttatccaaccgtttagagcctcattgacaggattatccgttggtttacctgcctgcgccatggagcggacaaggttgctgtcctgaatcagttcgttgtacgcttttgaggaatacacagagccttggtcggtatggataatggttggttctttctttccacgcagcatctcaacgatatgggcaactttatattcacacagggattgcccattttttacgccatttatgatgcgttttttcacaccacttttcccacctcaaacgggctttacaccacttttcccacctcaaaaatagtggttaattttcgccagaccgcaacatattgtggtcgatttcctcaaaaatcagaccccacagatttaagtatccgaacaataggtaaagaaaaaccccggaaaaccgaagttttccggggaaaagagaacttttttaacgcttggagaacttcgacagccccaaatgccccatgctgaatgtcaggaaatttcttcgttttctgcttgattttcagcgcaaatcagcattttttagatgtatttgattataattttctgctcgtgggttgaccacgaaaaactgattttgcatcctacgagttccttgtgtacagctgcccagggcttcacagggcaacaagtgagaagtaaatcagcgtgctgttatttgattcacctcaaaatcaaatacgcatacggaggacacacatcatggaaaaatgcatctttgacaggaataatggcctatggtacgaactccaaggcgactattacatcccttgtctggtgctggaagaagtgtacacccagcccatcggaatgtggggcagaaagcatctgcggtacatcaaggagcatcgcccggctctctataccgatttgcagaccagcggaaaactgagcagctatcttgcagaagtagacaaccgtgccaaggagatgcttgaccttctggtaaagcagatggcagaaaagcaaggcatcaccgaacagctcaaagcacaggatcaaatggcctgggtgcggcgcatgaataacatccgcaatgctgcggaagaaatcatcaatgcggaggtgatctttgcatgatagcgaaatatatccaggcattgaaagaatacgtcttgtcccatgagccgaacgtcggagatggggaatccattctgacacttctctacgaagcctatagcgaggtaaacaggatggacgatgaccaaatcgaggaagatttcaacgctctgtatcaggccatgaatggaatgacactgagagaaatggatcgggtgatctatccggtctgcactctctgccgtgaccacgagaaagcagggttcgtagaaggattgaaggttggaatcagattaaaggaagaattgatgcataaatgaggatggcaccaccggcatatgccggtggtgctttatataatttgaaggtaggaagccaaataaaagtgtgatagagaccaccaaataacataaaaattttgtgatgatggttgtaatttcggcggaagcggcatataataaaaatgtgattacaaggcaccggaactccaataaaagtgtgaaggagtgtatctatggaacgattgattttgaataagctgctggattggaaaaattcaccctaccgcaaaccgctgatcttaaagggcgtgcgtcaagtgggcaagacttgggttctcaaagaattcggcagacgttattatgaaaatactgcctattttaactttgacgaaaacgaagaatacaagcagttttttgagaccacaaaggacgtggatcggattttacagaatctgatgctggccagcggtcagaagattgtgccggaaaagacgcttatcatttttgacgaggtacaggattgccctaaggttatcaattccatgaagtatttctgcgagaatgccccgcagtatcacattgcctgcgccggatctctgctgggcattgccctggcaaaaccgtcttctttcccggtgggtaaggtcaactttatgcagattgatcccatgaccttcacagaattcctgcttgccaacggcgatgaaaatctcgccaaatacctggagagcgtggataccattgagccgattcacgatgcctttttcaatccgctctatgagaaattgaagatgtactatgttaccggtggcatgccggaacctgtgctcatgtggacggaggcacgggatgtctccgccatgcaggaagccttgtctgggattatcggtgcctatgagcgagactttgccaagcaccccaacatcagcgagttcccgaagatctcaatgatctggaagtccataccttcccagctggcaagggagaataagaagtttatctacaaggttgtcaaggaaggcgcaagagcccgagaatacgaggatgctttgcagtggctggtggatgcaagactggtgcataaggtttaccgcagtactgctcccggcctgccggtggctgcttacgatgatctgtctgcctttaagatttatctggtggatgtgggactgctccgccgcctggcccagctggcacccacggctttcggagagggcaaccgcctgtttaccgagttcaagggtgcactgaccgagaactatgtgcttcagaccttaatcacgcagtttgaggtggttccccggtattggagccagaacaaccctccgtacgaagtggatttcctgatccaacgagagaatgacattttccctgtagaggttaagtccgaggccaacacgaccagcaagagcctgaagaaatttaaggagctgttcccggacaaggtcaagctccgtgtgcgattctccctggacaacttgaagttggatgatgatgtgctgaatattccgctgtttatggcggatcaggcggatcagttgattggattggcattagagcaaaaaaacagcaaatcatcttgccgattttgaaatgcacgatatacagacggcatggctactgttaatgtagctatgccgtttgtcattttgttgatgtcacttccagctattcatataataaaagtaattacttttattaaaacgaaaaaactattataaagattgacagaagtaattacttttgatatagtttttatggaatgtgtatgtaaaaaaggaggtggttatgtggcgaaaatccaccatattgcaataccagaatatcactctataacagagttcctgcgaggccaagcctcacgcattttttcagatgtgaaagaaaaagacaaggttgttattgtgaataaacaaaacaagccacaggccgtcatcatttcatacgatagatacatacgactaaaagaaaaagataatttagacatttgattgttatttagagtagaggagaaatacacatgatgacatctcaaattaaagagccaagcatcagtacaatcatgtccatcccggatggaaagatattagattttttgacaaagcgatttgtaaacgatacgccagaggagtatgtcagacaaaatatagaaaaggctcttgttcgtcagtataagtacccaatcgatagctgcaaaccggaggtatcaataaaaataggatcttcaaataagcgtgtggatgttgtgatttttgaggaaaacaagcctcatatgcaggaaaatgcatatatacttattgaaaccaaaaaagctaaaaccaatcctcacgggaaaaaggacggtattgagcaacttaaaacctacatggctgcctgtctaaatgcaaaatttggactttggacaaacggtgacgaacgatattgcattgccaagcgagaaaaagatggcggatttttgtatgatgaaatccctgagattccatcctttggtcagacggaagccgaaatctacagacccgaacggaaaaatcttcagattgctacggctgataacctgctatttgcttttcggcgctgccataattatattgccggtaatgctggtatgcataaagatgatgcattctgggagttacttaaagtcattttctctaaaattgaagacgaacgttctggtactatcaacttttatgtgacaccttcagaattaaaagataaaactaaagcaagtgccacaaaagcaagaattcaaaagcttttccagtctcgagtcgttgcaaaatatccaaagatcttcaatagtgatgagacaaaaacaatcgaactatcagcggatgtgttggcttatgtagtatcgcagttgcagggctactctcttttggcttctcctgtagatgtgaagggtattgcatatgaagaaatcgttggctctaatctacgaggagatcgaggcgaattcttcacacccagaaatgcgtgccgaatggcagtagaaatgttagatccacaagccgatcagcgtgtaatagaccccgcctgtggtactggtggctttttgataactgccatgaaccatgcattgaaagttctgagagagcaagaagcctctctttggaacgatcctgataacccgacatcctatgaaattgaggaattatataggaagcgtgcagaatacctttctacatgcgtatatggtatagatcttaatccagcattggtcagagctgcaaaaatgaacatggtcatgaataacgatggtgccggaggactattcagagaaaacagtttgtctaacccacatacttgggcacctgaatctgctgcagcaattcaaatggggagttttgaccttgtctttacaaatccaccgttcggcgcaaatattgtgattgatgatgtgaatattctgtcgcaatttgaattggcagcagtctgggatactgatgaaactggaaagctttcaattcgacgagataaaaacggtgaacctgttctacagataagccagcctcctgaaatcttgtttattgagcgatgtgtgcagttgctaaaaccaggtacaggcaagatggcaatggtaattcctaacggtatcttgaataatccgtctctggaatatgttcgctcttggttgttgcttaatgctcaacttattgctgttgttgatatgcaacgagatttgttccagcccaaaaatgatacgcaaacatcaatggtgctcattagacgttttagcaaagaggagaaggcacttgcggaaagcggaaatattgattatccgattttcatggcggtagcagaaaagatcggtcatgacaagagaggtgccacaatctataaacgggatgccgagggaaacgagattctttcagatgtaaataaccaggaggaagctattgatcctgtaaccggaaagacaattgtttattctgctggaactaaggacagggtcgtggatgacgatatgcccgatgttgtggcagcctttaagaaatggcaggaagaattgctatgagaatctcgactttaaatagaacagaaatttcaaatagatgtcggctcgattcatcctattacctttcagaaggtaatattgcggtccggcttgtagaaactgcaatcaaaaattctcctcgctatataaatttgggggatacagatattgcaagtgtttggcaacccaatagaaatattttagtatatgcaggtaatggcgaagaatctgtgccatacttacagccgtatgacattttagagtatcttcctgaagcacgggcacagttatcgctccaccagaatcctgttgataaacttaaggtaccagagggcacaatattacagacgtgttctggaagaaacttggggccacttgttatttcagataaatatttggagaaatttgtatttggcagtgaccttatgagaatcacaattcatgattccagcacaagattctatgtctactctttcttgaatacatgggtaggacaagccttgttacactcaagcaagactggctccgtaattgaccatttgagtgcagacgatattcgtgctttgcgtatcccggtttttagtgaagaagtgtttgaaaaagtttcttccattatgcgagaatcgtatgagctgttctcggaggctcgcttggaattggttagttgtaaggaggaattcctttctgctgtaaatgttcataaagaaaacacttccctgtgcaaaggctggaatgtacaatttaagaatgttttttccagaaaacgtatagacgccgcattttacgattggacaaccttcgatgctgttaagaagctgcgagaggcgggtggctaccagttgtccactgttgcaaaaatacataagccggggggacggaataaaacaaattatgttgaaaaggagtacggtttgcctattctttccggccgccaactgcttcaaaatcaaactgttggattaaaatacttgcccaaatcgtctgccgaaaaatatagtagcttcagcttaaaaaaaggatggattgcatatccagcagatggccgtgtcgaaggaagattgggtactcccgtacttatcacagacagcagggacgaatggttcgccagtggacatgttggtcgtatagaagcacacgctgatatccatccaggttatctttatcttgctttttcacatcccattgtccaagcgcaattgtccgctgttgcatgcggttcagttgttgatgccgtttacccagaggatgttgagaaattcatcgttcctccacatgtagagttcaattacgacagagtaactacagcatgggcaatgatcgacaaagcagattcccttagaaacgaagcatgtaaaatacttcttcaagagatgaacgcataatcgctcatactattactcacgcaaaaggactggatttcacggttaagtgaaacccagtcctcattttatgtaactattatctattcttccatgacttccagcatcatcctggcttccaggcagaagctattctggaaaagcaggcactctgctatagcctgaaactcccggacacagtccgtataccgggagagcaactccttttgcggcgcatcagtcgtttttgcgtttactatctgctgaagatttatcgggtatcatcccttgagggcgtttttcctctgtgccgggagaaataaggccacagattgttgcgagaaatcacgtcttcatagctatggagcttgctacgaagatcgttattttcctgctccacttccgctgcacggattttaccacggacagatttatactccgagagttcctttgtagccacaaccagctgcactttgagatcggcaatggtgcttttcagttcagcaatggttttcttggcctccttcaggagctttttgagctttccttcctgtttctcctgcacgacaaatttctgcgcagccgtaacaagagcctgataatcctctcgttccagtgccaccttggaggatagcggcaggggcttggcttcaatctgttccacagccttgatggaaacctgctgctgttgaacacgcacaatcgtctgctccagctcagccagttcctgtgtgcgctgttcccgtttatattccagggcgctcaggtgttcccggtgttcgcccttttgctcccactcgataccatgctccaacatgatttcagccagtgcttctttttctctctgcacccatacggtacgctctgtcatggagcgtccttcgcctgtgatgccctgatcggcaagtgcctgtttcagagatacacgggtggaaagacctcgcttgcttccggtggtatatggaatgaagtcaatgtgaagatggggcgtggcttcgtccatgtgcagatgggcagagaacacatgaagatggggatttcgctcttggaagctgcgcatgaatttgtccaaaatagctcttgccagttttccgttctcgctggcggcagacatatcatccttgtttccgatctggaagatcacctcataaaatggcttttcttgatctccgtcgcagattttcttgtaatagttttcgatgcaccggtctttgcgtttctgtttgacgttgtacgctgccagagcttcatcgaacagctcatgatacgcctgctcgatgggcatatagcagtattcgatgttcagatgcgttcgttcggggtcaacattttcagcaatataggtgcggcgattatgctcaatcacacccttgcctgacatagcactgatagtccgttttatatctgtcacctccgattttacagtagttataataagaattcttttcgccgcgccagcggcgggttttgttacttttgtcaaaagtaacgctaaagcacttttgacagcagagccatcaaaagttttgcgctctccgagggggtatgcggcttctgcggaagcctcaaccgtcatttgaggttcaaatgacggtacgggtggtaattcattcgcagcctgtatagctcatgatttcccgcccgttggcagggagaagtccgtaatattctccctgccggtccacactgaactctgcggatttcagtgtggggacgggggtcacgagggttaagcaggaaatgcaataaatgcagtatattcctgctcacgctgcggcgggatttacgaagatcctcacgtccgccggtctgccggctgactgccgttccggttcttccatccggaggtagccgtgcccttccagaagctccaacgtcggaaagatttcctccgttttcttgaaaaacttgccccggcacatctgaaaaagatcagaacgtttgatcatagtggcgttcttctttttcagttttgccattacaaatttggctttctggatgctgagatcagttcccatcatggagtaagcgtaggtggaatgagccagaaagtatttcccaatttgaattgcccggctcacggtcgatgcggaaatttcgttctcgccatcgtccatatccgcaccatggagaagtcctgcaatccgaagaactgcgccaatatacttgctggcccaatcggaaatggcctgcccttcaccagccagaaacctctcgtgttcctggaagtagtcagccatcaggtcaaaggctttctcggagagatacagcgtctgagtgtcctcgctgattggcaatgccatcaggtgaaatatcagattgcgataggcggcgctgactttgggaggaacggatggagttcggaatgtccgcccgccaattctggacggcggcgacgcatacaggaatcgtgcaatcagtccccggcctgtcatggtggtattggacatgatctcgtccagcacgctgggctggatggagagaatggcggacagggccggatgcatgatgcattccgaatcacgggtcattctgtctacatagatggtatcaccgcaatgccccttcagccagatgtcgatattggccttgttggaataccgcccggccataatatcgaagatgccgccctcggtggagatcacggagaacacgccgccgttggctgccatcaggctggtcaatgcttcgctggaacagtcatcggcaaagaagcggaccggcttcaactcgggcatatcttcaagctgctcttgcagatgccgaagctccagttctgtttcacgatcttccctgcgttccagcttcttttgcagaccggagatttggcgctccaacacttcccgctgtaagcggttttcccgaatttcagagctgcgggattgattgtattcctgctcgtattcgtagagatacttggtcatatcccgcatgacgctggatttgcgctcgccgggggcggcaatcaccacggtgtataggctcagcggttcataatagccaggtgtgccttccaccttgtatttgccttgcaggcagactgccaggacgccaaggctgattatagctgccatgtctggtgctgtctggctgtgctccgcaactgcgctgacatatcttcggatcgtgtcaggcaacgcatccacaggaaatggcggcagatcactccactgtggcgtcaatggcaccaatggtggaaattgcggtgtagtctcttgctttggcatgtagacctctttgcaattttcaatggctttctggatggtaatagctccataggttgtcccggattgctgccgatcccatttgtcacgcatcaggccggattggcggaacatagtatccatttttgctgcatcttttcttgtccagaatgccaggtgactgcataatgccaaatctgcttcagactgggaagcgtatcccattgtggaaccatcccagagggaagtaaaagccgatccgtttttgctggactttgccatactgagaagctgcgctgtatccatgctggaattatctgcatttattgcatttgctgcattggtttccggtctgaccatgaatcgctccaaaaggatttgcagttcctttgtgcgatctccaaaatcatattgctcacatacttttccggtcactgtcacatatttgttggttgcgcctgccacatagacttcaatgccggcctgatgattcatgatataaaatcgtttggtatcgtactggaagccgtctgcccggaacagaatgtgcaatccgttcccactggggctgtattcggtgtagctgtgcatcagagtaacgatctctgcggtaaccccagtatagtaaccgctgtccgtcacgcagttgtccaggtcaatggcacaaatcccattgaagataccaaggccgataccatcgtaaccttttgcctgtactgcgacatcgtaggacacgaagctgtttggatcattgcttttggctccaagcccggtatccggttggtaaggaacttttgttttctttccgtttctttcttcataccgccaacagcagaacagaccgtcttttcttaaaatgtctggtaacgctgtcaaattcaaataacctcctgaaaatcgttgttgaaattggcagctgccgtgttataatatccatgcgaacggaccgttcacacggcagctgccgttgggactgtcttgaaagagttctcatctgccaggatgagggctcttttctttttaggctgcctccggctggaaatatccgatttcttcccatactttccggtcagggcagtagtagttgtactcgttggaattatccagcttgatggcatagccgaatttcagaatgcctttttgcaggccaactcgtacatactgagcatccttgtgcattgctgcggcaatctcagtaatgggaacattccgtccggtgaaaggcggcagctcaacataaaccttcttctccatgtttctcacctcctcacctctgaaatgcgaatttttaattcgcattcacattatatcctccccatgacgccttgtcaagagtaaatgcgaataaaaaattcatattacgctcttgcaattcgcaggactccgtgttacaatacaggcgaggtgattcaaatgaacagcaatccagctgaaatcggcgaacggattaagtcggcacgaaaagcggccggtttaagccagacagagcttgccactcggctcaacaagaccctgcgtaccatccagaaatatgagagcggtgagattgaaccgtccattgccatgatcaacgccatagtcaaggagctgaacgtgtctccggcagatttgatcggttacagacggcccagcatcgaactgaacagcctgtccgatgtgattgcggtgctttaccagcttaacaaaaaagcgggcatccggtttgaaattgatgtgcagcgtccgccccacagcgaggaatggtcttgctctctgcggttcaaggggaacgactcttcggcggaaatgaatgactccctgtgcatgatattggaggatttccgggacgaacgtgagaagctggaaacctactggacagatcaggagggtttcgaccgctggatggaaaaagagctggcctattatgcggaagccaagctgcaagacagggaagtggaggttctcaccgagatggagcgcatccagcgccgcaacgaactggatcgccagcggctggagcaaatgaaaaaggctgccgaggaaaacggcagccagcagtgatgaagggaaagtaccttcaaattctatctttagtcactgggagaaaggaagtttgatactatttgagattacccaacggatatggaagcgtcaagaaaatgtccggaaaacgaagaagaccctatgctgtcaaaaagactgtcggctggcattgggacgaagaaaagcagaagcaaattcaggagcaaatcaccatcggttatgcggccaccagagcggagggcttgcaaatgctggcggagtacaacaataaccccttcgatgtgaaagcgtccaaggccaccttccaggaggtctatgagtgctggtcaaaggggaagtatcccaccatctcggtctccaatgtgaagggctatgaagcctcctacaaggtgtgcgggacgttgtaccataaggtgttccgggagatcaagcttgcggatttacagcttgtggtggacacctgcgggaagaactatcccaccttgaaaaagctgaagggcctgttcagtcagctgtatgactacgctatgaagaacgacatctgcaacaaggactattccgagtttgtggatattgtccgttacaaggacaagaatcctgacaaacgtgaccggaacaagtttaccaaagccgagatcaagtggctgtgggagctggcggaggacccgttctatcagatcgtgctgatgctgatcttcaatggctgccgcatttcggagttcctggatttgaaaaaggaagatgtccatctggaagaacaatacttcgacgtgattgccagtaagacagagaacggtctgcggaaagtcccgattgcagacaaagtgcttccgttttacaaggcatggtatgaaggctccaaatgcgaatacctgcttcataccactgatcagaagcactttgactacagaaactattatgacagctattttacacccctgatggagcagatcggcttcaaccacacaccccacgacaccagacacacctgtatctccacgctgacagaagcgcatgtggatcagaccatgattaagaagattgtcggacactccggtgccatgacgctcaccgaacgtgtttacacccacctggatattgaaaccctggtggaggcaatcaaccagatttaagagagtacaccatgaaaacagctgataacgaaaaagcaggagatgttctccttgcggatacatctcctgctcatgaggcttcggtttttgcttgcgatatttgttccttgcttgctccttgctcgctccttacgcagtcaggcacagcactttgcaggaactctcagaacttcaaaagattcgataaatccaacgaaacagcgccctgagacggactgaaaagcggtggaatttatctcttggggaagtctggttaacgcttggagaactgaggcgcgcgacgggcggctttgaggccgtacttcttgcgctccttcatacgaggatcgcgcgtgaggaagccggccttcttcaggacggtgcgatactcggggttgaccagcagcagggcgcgggccacgccgtgacgcagagcgccggcctgaccggacacgccgccgccctcgacggtggcaacgatgtcgaccttgccgagctcctcggtagcggcgaggggctgacggacgaccatcttcagggtctcgagaccgaaatactcgtcgatgtcgcggccgttgatggtgatagcgccggtgccgttctggaagaggtgaacgcgggcgacggaggactttctacggccggtgccgtacagataaggcttcttggactgatacattcttctcttcctccttagacttcgtaagcttcaggcctctgagcctgctgctcgtgggtatcaccagcatagatgtgcagacgcttcagggagtccttggtcacggtgttgcggggcatcatgccgcgcacagccacgcgcatcgcaagctcgggcttctcctgcatgaggatgcgatacttggtctccttcagaccgccgacccagccggagtgcgtacgatagtacttctgctccatcttgttgccggtgaggatggccttggaagcgttgatgatgatgacgttgtcgccgcagtcggcgtgcggggtgtaggtgactttgcgcttgccgcggagcagatcagccgcagcaacggcggtcttgcccatgggcttgccggcagcatcgatgacgtaccacttacgctcgatgttgcccttgttcgccataaaagtggacatggtgtgtttcctccatattgatctatgaatgaaagctcgtgctttacattttctttgtcccttggtaaaatcggaacgagtctatttatagcattccggcgcggaaatgtcaacaccattttaatttagcgcaagcaatgctcgtaaattctctcgttttctttgattctctctcaatttctcaaatcgcaaaatcgaaattcttttatttttcgcaaggagctgtacttatgcaggaaatcttgggcctcgtgcgccgctgcgtcacggactatgacatgatcgacacgggcgagacggtcgccgtcggcgtttccggcggcaaggactcgctcgtcacgctcaccgcgctcgcgcgcctttccaaattctaccagaagccgttcaaggtcgtagccatcacggtcgaaacgggcgtgccgggtatgaacttcgacgccgtcgcggcgtattgcaaatcgctcggcgtggagtacatccgcgtggacgtgccgatctacgaggtcgtctttttggagcgcaaggagaaaaatccctgctcgctgtgcgccaagctccgccgcggcgcgctctcgaccgcgatgaacgagcatggcatcaaaacgatcgcgctcggccaccactacgacgacgcggtcgaaacacttttgatgaatctcctctttgagggccgcatcggctgcttccagcccgtgacatacctgagccgctcggacgtgacgcagatccgcccgctgctctatgtgaaagagcagcaggtgcgcaatgtcgcggcaaagctcgatcttcccatcgtgcacaacccctgccccgccaacggcgaaacgcgccgtcaggaggtcaaggagctcatcgagtcgctctccgagcgctaccccgacctcaagcagaaattgttcggcgcgatgcagcggtatccgctgtatggctgggatacaaaaaattcggaaaagtgacgttgtcacttctccgagaatatttcactgcgctttgtgcctcggttggccgctgaaagaggccaattcgacacacgcttcgcgcaaagtgttttctgccacgcgcatgtcgcggcagaaaacgattaaaatcttttcgtgcctatgggcacgaaactctacgaggcttttgtcctatgtacattaaataaacaccagcctcagcaagatcagcagtgcgaggcccggcacgccgaggacggcgatgacgagagcgttgaaaagattcagccccagcgaaagcttggcgagcacgccgagcgcgcttagaatgccgagcagcgcaaagccgagcagcgtgttgacgagcagcttgcccgcgagcttcaacggcgcggcgaacagcctgagcaccgcgagcagcgcaaacacggcaaacaggacaagcagtattttttccgttatccccattttgcgaccccctcgctgcacgttttgtacacggcttcgccgctgcgctccttgatctggcgcagcaggtagtcatagcgtgagagctcggcgttgatctcatacacgcaggcgtcgacgagctccggcgcgcagaccgcgttgaagcgcgcgtacgcctgcgacagcgcgacacgcgtgtcgcgcagctcgctgaacaagtcctgcatggatgcatcgcgcgcgatgtcacagcgcagcaaattgacctttcgcatgttttcgccctcccatacctctgcaatgtcagtgtatggaaagtgtggacaaatattcctcttttcaaacaaggagccaagtatggagcatgaagattatatgcgcgaggcgctgtctctcgcgcgcgaggccgcacaggagggtgaggtgcccgtcggctgtgtcatcgttaaggacggtaagatcatcggccgcggccgcaaccggcgcgaggaaaagcagcgcacctcttcccacgcagagatggaggccatcgcgcaggcaaatgaagcgctgaagtcgtggcggctcgacggctgcacgctctatgtgacgctcgagccctgcccgatgtgcgctggcgcgatcgtcaacgcgcgcatcccgcgcgtctactatggcgcgcgcgacgaggcgatgggcgcctgcggcggcgtgctgaacctctttatggagcgctttcccctccgccccgcgcttgtgggcggcattctgaaagacgaatgccgcgccgtgctggccgattttttctgcacactgcggtgatttcaatttgttcacataatgcccgattcatttaacacttttgtaacactttccctcgaactttgttaacatgcgtcctttatcttaattcttgcaagagacaatagcttcttttcatccaatcttccatcttataagaaaagggacgccgcgaggcgtcctttttcgttatattctgatgtaggatggcgtcacggattgaagtccgccgccgcgccgataccgagcgcgatgcacgcgccgccggcgtagaagaggatctcggcaagcgtcgggcgcgcggccaaggccgccgcgcaaaggatgacgctcatcgtgctcgcgggcatcagcagccgcggcgcgccgccgcggaaagcaaaggccgcaaattcgagcagcagcaccgtcagcgccgcgagcgccagcgtttcgacatagtaatgacgcagaatcgggtccgccgcgtgctcgcggtagaagaggatcagcgcaagcaccatcgcgcacacgggcacaagcagcgcgatgccggggaactccgccttgcggcgcagcgcggtcgtagcgtacagcaggcatgccgcgccgactgccagaaaaacggacaggatcatcgtaagcgtcgtgcggagcgagaacaccaacgagcacaccgccgagccgatcagggcaaagctgccgagcaccatcagcatgaccgcaagcgtcgagcggtcaaaggcgaagtagaggtccatgctgccgcacagctcgcgctgagcgggatagcgctgcgccataatgaccgcgatgaccgctgcgacgacgagcaccgcgggcagcgccatggcgtttaagtccatcgggacgggaagtccgtccgcgtcaaagccgactgccagcaggcggaggcgtgccagcaccgctgccgcagaaaaaagcaccagcaaaagccaatgaagaattttcacaaaaccgaaccctttctttttccggaatacggcgcgcacagcgccggaaaacatctatttattgatgatagcacactcatccccgtttgtccatgaatcattttgcggacaagtcggtcatacactgataaaaacactgtcacttaagcatcgcggccgtgggccgcagggaggaacacgccttgaaacagcttcttcgcatcacgatattattgatcggcctcatctggatcctcgcctgggcggcggcaggccgctttgacgacacgccgaacacacagggcggctcggaatctcccctgccgagcggtgagatcgccgcccccggcgagcgagacagcgcaaaaacgctgctcgtccaaattcagggcgaggttcaggagatggacatgggcacataccttctcggcgtgctgcgcgcggaaatgcccgcctcgtttgaggaggaggctctcaaggcgcaggccatcgccgcgcgcacctacacgctctatcgcatccgcggcggcggcagcgcgaaccaccctgacgccgacgcctgcgacgatcacacctgctgcaaggcgtatttgagcgccgagcaggctgcggccaactggggcagcatggctgtctactacgaggaaaaactcacacgcgccgtgagcgaaacggacggcgaggtcattttgtacgacggcgcgcccatcctcgccgtgttcttctcgtccgccgacggcagcacgcagggcgcaggcgacgtgtggatgaacgacctgccgtatctccaaaaggtcgatagccccgagacggaagagctcgtaccgaactactactcggtcgcgacgttcacggcggcggaattcaaatccctcgtccttgccgccaagccgggcgccgacctttccggcagcccagaggactggatcaaggatatcgtgcgaaatgactcggactatgtcgcctccgtcacggtcggcggcgtcaagctgcgcggcaatgacctgcgcacgattctctcgctgcgctcgccgtcgttcaccgtggaatgcaaggacaatgcctttaccttccacgtcacgggctacggccacggcgtcggcatgagccagtacggcgcaaatatcctcgccaagcagggcctttccgccgaggaaatcgtgcagcactatttttcgaacaccaccgtcggctattatgacggctgaggcatcgcggatattgcaaagcggcggaaaaattgctataatattaagataaaatacgcaaggaggtgggagaaatgaagagcaagcgttttttgtgtctgctgcttgtattgctgatggtcttctccctcacccccagcgaaacgaaggccgagacgactgtctatttcaccgccgtcaacgaccagcttttgccagatctgagcgatgagacgatgccgttctggtcgggtgggcggctgtatgtcccctccacggtcatcaccggcacggacttgggccttttctactcccgaagccgcgacaagagcactgccgttgtctaccggcagggcagtgcgctgacgttcaacttcgccgccggcaccgtcgctgaccagaacgaccgccagtacagcggtccggccatcgtgcgcagcgacgttgtgttcctgccgctcgaccttctgacgcagtttttctcgctcgactacagctacacgcgcgtgacctacggctatctcgtccgcgtcaagagcgacacggtcgtgctttcggacgcgaagttcatcgacgccgcggccatgtccatggagcagcgctacaacgaatacatgaagacgcacagcgactcgaacgatcccggcaacacgccggatcagaacaccgacggcgaccgcgaccttgtctgtctcgcgctgcgtgtgacggacgaagagagcgcaaccgccctgctcgacacgctcgcaagcaacaacgcgacggcgacatttctcttctcggaagagcagctttcctcgctcggcgatctgctgcgccgcgtcgtcatcagcggcaacgccgccgcgctgcgcatcgacgcctccggcggcagcgcgcgcactctcagcgcgatcgagcgcgcaaacaacgcgctatgggccgcgtgcaacgaaaaagcgcggctcgtcgcgctctacggcgcgtcggacaagacgctgcgcgctgtgcgcgccgcgggctactgtcccattgactttgacctggattacagcggcggtcttcccaccgcggcgcaggccgcgagcagcatcgcgcgtcaggcccgctccggcgggtgcatcgcctatctcggcgctgacaccgccgtgcaggcagattggagcacgctgctctctcgcctccgctcgtcctcgcgtctcatcacggcgctcaacgagctcgcggtcacaaaggacgcgtgacggttttacaaattgttcaggaaacgcgcacagttttgcgtataataaacaataacacagaagaaagacacacgcttgtgtgaaggaggaaaccagcatggcacgcaatattcttgtcgtggaggacgacaataatatttccaacctcattaagatgtatctcgacaaagagggcttcgacgtccgcatcgccgccgacggcggcaaggccgtggaggaattcaaggaaaaagagcccgacctcgtgctgctcgacgtgatgctccccgtgctcgacggctggggcgtgtgcgccaagatccgcgagacgtccaagtgcccgatcatcatgctcaccgccaagggcgaggtcaacgaccgcatccacggcctggagatgggcgcagacgactatgttgtcaagccctttgaaatgaaggagctgcttgcgcgcatcaacgccgtgctgcgccgcagcgagatccccgaggacacgcacaagcgcctcacgttcgacaagctcatcatcgacctcgactcctacgagctcatcgtcgacggcaagaagatcgacacgccgcccaaagagctggagcttctctatcacctcgccgccacgccgaaccgcgtttacacgcgcaatcagctccttgacgaggtgtggggcttcgactactttggcgactcgcgcacggtggacgtacacgtcaagaggctccgcgaaaaggtcgaaaacgtcagcgaccagtgggcgctcaagaccgtctggggcgtcgggtataaattcgaagtgaagtaattcagtatgccggaagaaaacaaagagaaaacacagaaaaagcgctggacgctcaaaaaggtcaagacccgctgccgcacgatctactggcagaattttctgctcacggcgagcgtcgtcatgctgacgctggcgctgctcggcagcgcgttcttcgcgctgacgtattcctacgccatcgacgagcgcagcgagcagatgcagagcaaggcgacggtcgtgtcgcacatggtgtcgtcctacatggaaaacggctcgctcacagggctgcgtgagctggcagacttcgcttcgaacgtgacggatgcagaatttctcatctgcaactcggacggcaacctgctgctgacgaccgatacaactctcgtcaaccgcgtgctgaccgtgccgcaggacgtggccgagggcgcgatgagcgatgacacctacgccgtgcgcaccacactcggcgacatctatgaggacacgcacttcgtcgtcggcgtgccgatcgtgagcgagggcgcaaccgtcggctttgtgctggcggtgaccggcgcgcgggcgctgacgacgatgtggcgcacgtttattggattgtttttcatgacggcggtgacggtactgctgctctcgttcgtcgtgagcgcgtgggtcagcatgcgccagtcgcgccccatccacgagatggcggaggcgacgcgccgcttcgccgagggcaacttcgacgtgcgcatgcacaattacgagggcgtgaccgagatcacagagctggcagaatctttcaacaacatggcggactccttgcaggagaccgagcgccagcgccgcgaattcatcgcaaacgtctcccacgaattgaaaaccccgatgacgaccatcgcaggctacaccgacggcattctggacggcacgatcccgcccgagcaggaaaaggagtacctgcgcatcatctcggacgaggcgcggcggctttcccgtctcgtgcgccgcatgcttgaggtctcgcagctccagtcgcgcgacttgacgcgcacgaaggcgccgttcgacgtgtgcgagagcatgcgccgcgtgctcatttcgatggagaagaagatcaccgaccgcgggcttgacgtcgacgccgacattcccgacagcggcatcatggtgctcggcgacaacgacctcatcacgcaggtcatctacaatctgctggaaaacgcgacaaaattcgcccgcaagggctccgcgctctatctcggcgtgacgacgctcaacggcaaggcgctgatctcggttcgcaacgagggcgagaccatccccgccgaggagatcccgctgctctttgagcgcttccataagagcgacaaatcccgctccgaggataaggacggcgtgggcctcgggctctacgtggtcaagaccattctggaccagcacaaggagcacatcgccgtcacaagcgaaaacggcctgacgacgttcaccttcagcgtgacgctcgccggcgggcagaccgcgcagtaaagtccccatcaggagaagcaaacactatggatcacgagaatcaggatattccccagagcgggcagggcaatgagccgcgcgaggtcgtgctgcgctatgaagcaccggtcacgcccatcgtggaacgctacattcagcccacaccgctgcccggacagccgaaaaaggacccgccgcgtaaaaagcggaaaggacttaaaatcttccttttctgcatgctcgggctgttcatcgtcagcggcgtcgtcacggcgctgtggctcggcggcgcgttcgacgatcaccgttcctatcacgacgatgattttgagcagcaccatgacgaggattattacgataacagcgagcatggcgaaacgaccatcaagcgcctgcccaacaccgatcaggtcaagctccgctacaacgagagccacggcgaggcgctgacgatccaggagatctaccagaaagtcaatccctccaccgtcacggtgctcacgggcaatcgcgacggcagcgccatggtcggcacgggcgtcatcttcaccgaggatggcttcatcctcacgaacgcccacgtcatcgcgggcggctcggagtgctacgtcgtgctcgacacgggtgaggattaccgtgcgtgccttctgggacttgacgaagaaaaggacctcgctgtcatcaagatcgcggccagcggccttcccgccgcggaattcggcgactctgacgcgctgacggtcggcgatccggtgttcgccattggcaacccgctcggcgtggagctgcgcggcacactgaccgacggcatcgtctccgccatcaaccgcgacgtgtacgtcgacggcgtgacgatgacgctcattcagacgaacgccgcgctcaacaacggcaactccggcggcccgctcatcaatgtgtacggtcaggtcgtcggtatcaacacgatgaagatgggctcgtcctccaccacgagcgtggagggcctcggctttgccattcccattgcctcgaccgcctatatgatcaatgacctgatcgcctacggtgaggtacacggcgaggtgatgatcggcatttcggtgcagcccgttcccgtcacggcagaaaatggcgagagcgcgcttctcgtcatggaggtcacgcccggcggccccggtgaggaagccggcatccagaagggtgaccttatcgtagcggccgacggcgaagcgttgacaaagtccaccgaccttctgcgtgtccgccgccgccatgaagcaggcgaaacgctcaagctcttagtcgagcgtgacggcaagcgcttcactgcagacgttgttttacgcgaaagcgacacatgaggatatcgacatgaagaaaaagcaatttgcgcttggctcgctgctcctcggcgccgcctcctggctgtgcctgtggggattgcagcatattgagcgccgcatgaaaaagaaacaggaaaagtaaaaaaacaacgatccccgtccggcggaaggttccgccggacggggatcgttttgtactctgcaccagcgctgctttttctggtcgttccgttccttttatattgcaatttagagaatagattctacaataccaccatttctgattttaaacaagtctccccattcagaatagtatccatgcataataacaaccgaatcaacttcatattgccatgtaacttcatatatttgagatgaaatatcgcacatttattttccagcacgctgaaaaacgcatatgaaaggccgggatagaacaataccgcatccgttgaatagtccttaatcgttgtcacgctgaccggctgtcgaaaatctctccgtcgctctgggcaattcattttcttcgttccgtcattgcagcacaccatatatttccctcttgtctgcaaatcattgatatagcgacggataaatccctcggttatctccgttacattctcaatcagcatttcatctccacaccatctttcaaacagatgaagtgtctgctcatagctctccattgtcttttcgctgagctgtttgctttggcaatagagcatgtactcgtcgatctgccaaatcattttgttagtaaacataaaaaactcccccaattcatccggttttgtcacccaatgaattgagggagttagtagctttaaggcgatagatttatagctttttcaaagcgttttcattgtattttggccttgtttatcgctttgaaaaattcctgactactcggaaaatcccttgtgtcgcctatacttcacctcacaccctatagatcttccgttgtaaacggatgcggtccgcgatcatggcgataaactcgctgttggtcggctttcctttcgtgttggataccgtgtagccaaaatagcgctggagcgtctcaaggtcaccgcggtcccacgcgacctcgatcgcatggcgcaccgcgcgctcaacgcgcgagggcgtggtgctgtagcggcgcgcaacctcgggatagagcacctttgtcacggcgttgatgacatccatgtcctgcacggcgatgacgatggcctcgcgcacgtactgatagcccttgatgtgcgcgggcacgccgacctcgtggatcactgccgtgacctcgcgctcaagcgcctgcgactcgtcctcgctctcctcaccctcgttgaccgcgcggcgcatctggtctaaaagcgaggtcagctcgcagggcttgggcatgaagaacgatacgccgcggctcatcgcctgcgacacgatctgatcgcgataaagagccgagacgacaactgtcttcatctgcaccttgtccttcgccgcctgctcgagcacgccgaatccatcgagtcccggcagcaaaagatccatcacaagaagctgcggctttcgctccgctatatcctgcgccgcagccagtccgtcggctgcgcatcccactacgtcgaactcacccgttgcttccaatgcctgtttcagtgctgtgcggaactcctcgtttgcgtccgctaatacgaccgtgatcctcttgtccatgtcatcccgtccttttcacacaagttttcgccgacccagccggccagcttcagcagcaaaatgtgacgtcttcgttctgccatggctttaagctaacatatttggacagcgttttcaagcgagttatgtcgaatctaaccatctttttctaactttttgcgcgaaaacttggttgtttttacggaatcttaacacaaatgttcttccatcttggtaggttattcactcgaaaggcccgccgcagagagcatattttcgataaaaatgccataacctcttgacggatcatccaccagaacatgcgtcaccgcgcctacaatcttgccatcctgcaaaatcgcgctgccgctcattccctgcaccacgccgccggtctgcgcaagaagctcctcgtccgtcacgtgcagcagcaaatttcgcgtgctgccggaaggcgaatagattttttcgatctcgatgtcatactcgcgcgtttcattgccggaaacggtggctaagatcgtcgccttgccggtcttgacctcgtccttttttgcgatcggcagcgccgcgccggtgatctttgctgcgtcctctgccgagagcttgccgaaaataccacattcggtgttggcgtaaagcgttccgctgtcgcgcgtcaggtcaaagtcgcccttgagctcgccgggcgaggcgcactcgccttttttcaccgccttaaccgcggcgtccatgatgctgccgtggtcgagcggcaaaagctgtcccgtgtccacatccgtgaccccgtggcccagcgcgccgaacgtgccgctctgcggatcaaagaaggtcatcgtgccgatacccgccatactgtcgcgcacccaagcgccgaggcggtactcgccatccttgtccttctccggctccgcgctcagttcgatcgtgcggctgccgcgcttgacggtcagcgccgcggcgtcctcgccgttttctgccagaagttggcggaattcctcaatggtgtccaggctttgcccgccgatggccgtgatgacgtcgccctccttgagtccgcagtccttcgccggactttccccatcggaaaagcccacgacgagcacgccgtcggaaaagagcttgacgccgacggtctgtccgacggggatcagctcgctgaccgtccggtccgccgcctgcgcagacggcattgcgatcgcggcggcggcaaaaaatccaagcaggatcgccgccgttcgcttttttgtgcgatgcgttccatccattctctcaccccttcaaaaaatacaggcggacggcgcgccctgtgcgcgcagcgcgcagccgtccgcccaacgccggaaattttttctttctcatttctttttctctgtccggcgcatttactttctgcgcttcgggcaaaattaaaaggtgcaaaattttgatgcgctggcatcgctttttgaaatggcgctgtaaatgcggacaaaaaaattccgcagaccaaagtctgcggaattttgggaattgtttccatttaacgctcgcggttgaaaattttgaagatgtcgtcgaacggatcgggctcatcttcgtgcttggcctcttcctcggccttttccttgtcgaagtcgagcggcgcaagaccggcagcggcgctctcgccgctctgctcggcaggcttcttatccttgttgaagtccagcgcgccgggcgccttgtcaaagcccgtggcgatgacggtgacgcggatctcgtcgtcgagcgtctcgtcgaacgtcgcgccgaagatcgtgagcgcgtcgggatgcacggcctcctgcacgagggacgctgcctgctcgacctcgtcgaggccgatgtccatcgagcccgtgacattgatgagcactccgtgcgcaccgttgatggaggtctccagcagcggggacgaaatggccatgcgcgcggcctcctcggccttgttcttgccggcggcgcggccgacgcccatgtgggcaaggcctgcatccttcataatggcggtcacgtcggcaaaatcgaggttgatgaagcccgtgtcgcggatcaggtcggagatgctctgcaccgcctgacgcagtacgtcgtccgcgatctcgaatgcgttggcaaaggtgatcttctggtcggtcgcatgcttgaggcgctcgttcgggatgatgacgagcgagtcgaccttggtcttgagctcttcgatacccgcttccgcctgcgtcatgcggcggcggccttcaaaaccgaagggcttcgtcacgacgccgacggtcaggatgcccgcctcgcgcgcgatctcggcaacaatgggcgcgccgcccgtaccggtgccgccgcccatgccggcggtgatgaagaccatatcggtgtcctcgagcgccttggcgatctggttgcggctctcctcggcgctcttgcggccgacctcagggtcggagcccgcgccctgaccgtgcgtcagcttttcgccgatctggattttataagtggcggcagacacgttgagcgcctgcttatctgtattcactgcgacaaagtcgacgccgcgcgcaccggtgcgcaccatgcggttgaccacattgttgccgccgccgccaacgccgatgaccttgatcttaactacgttttcaggaccggtctccaatccgaatgccatgtcggttcctcctgcaatctgttgtatgggcaaggcacttgccgctgcaagcgccacaatatcaggtatttgctatcttaattattgtattacggttttcccgcggggtcaatagcaatcggccatttcggggaaacttttttacgtcaacttccgcctttattccgggatgaagtcagccctgccgtcgttcatcaggttgatcgtgccggtctggttggcttcaagctgctccaccaccgtgcgcacattcccgagcttgtaggcaatgtccgcatcccagggcattttgaccgtaaatcggtccaaataggtaaaggtgatggccgtgccgtcgctcaggtcgatctcgccgatcatggagagaagctgcttatcctccgctgtgcgcagcagcgtgagcaggcgctcgaatttatacgaatccccgtccgcaaacgccgccatcgcgccgaccgcgggctcgacgagcgtgcagccggtcacgcgcgcgcagccctcggggatctgcgatgcgcgctccagaattttgccctcgtcgctcatgagccatgtgccattctcgcccgtcagcgcagcggaggccgagcactccgtcacggtcagaatgagcgcgtcggggtatttgcggttgatgacaacggtctccacatacggaagcgtgtcgaaaatggattgtttgaccttatatttgttcagcagcacaaggttctgctccttctgcacgcccgcagcctcgatgatctgctcctctgtatagcgctcgttgccctccaccacgatcatatcgatgcggaagaacatcgtcagcgcgccgagaaatgcggcgatcacgaccgcgaggcacaaaagtctcagcgggaaagaggctcttccccgcctgcgccgtctgtttcttcgctttgacgccatagttttcctgcctttttcttcatttgcttatgtactcgtctcccgccgcacgtgcgcgcccagcacgccaaggtcgcgctcaatgctctcatagccgcggtcgatgtgctcgatgcgcgaaatgcgcgtgagtccgtcggcctgcaggcccgcaatcacaagcgccgcgcccgcgcgaaggtcggtgcacttgacgcgcgcaccgtgcaggtgctcgcgtcccgtgacgacggccacgcgtcctgcgacgcgcacctcagcgcccatgcgcgccagctcgtcgacatggcggtaacggttttcaaaaatattctctacaaaaacggtgctgcccgcgcttttcaaaagcgccgccatcagcaccggctgcgcgtccgtcggaaagcccggatagggcgccgtgcgcacagggcggatggatctaagactgccatcactttggaggaaaacatcgtcctccccgcttttgaccgtgcagcccgcctcgctcagcgcgccggacacagtcgaaagcggccgcgggtcgacgccgcgaaggcgtacctctcccccgcagcaggccgcggcgcagagatacgtcgcgcccacgatgcggtcggcgatgatgcggtatttcccgccgtgcagcgcgcgtctgccctcgaccgtgatgatcgagcctcccgcgccgcggacgttgccgcccatcgcgttgataaagttctgtaaatcgacgatctccggctcgcgcgcggcgttgtagatcgttgtcacgccgtctgcgccacaggcgcagaggagcgcattttccgtcgcgcccacgctcggcatgggtaagtacacatcgctcccgagaagcgttccgccgcggcacttgagctcgccgcccgtctccctgatctctgcccccagggcgctcagggcgcttaagtgcaggtcaatgggacgcggccccagctcgcagccgccgggatagcagatcgtcgcttccttgcagcgcgccagaatcgcgccgagaaagatgaccgacgagcgcatctctcgcatcagtgcgtcgggcacgaccgcgcggtccatgcgcgctgtgtcgaccacgagcgcactgtcctcccagtgcgtgcagcagcccaagtgccgcaaaatggcaacggacgcatccacgtcccgcagcttcggacaattttcgatcacgcaggtgtccgcgcacaaaagcgtcgccgccaaaatcggcagcacactgttttttgagccttgtatcgtgagttctccgtacaggcgctccccgccctctaccaacagctcacacatcatgttccctcccgcaagcacattacttttccatcgtatggcttttgcgggaaatgggtgactgccggttttcgcagggctatagttaggcattttcagtatagccattttgccgcggcgcgtcaacttctttttgccttgctttcccgcccgctttgtggcaaaatgagactattgtatttctccccgaaaggagtcttttttcatgaaaaaaacgctcaaagttgcgctctatattctgttggcgctcgttttgatcgtgctggcttacgtcatctatgtctttgccgcgtactaccgcgtggaggactggcagacgctcgacgtcgtgcagttctccgtgcaggatcacacgaccggcggcgaaagcgcgctgccgatggagagcgcgccgcagaccggcgtcacctaccgcgtttcgtcggccaacgtgggcttcggcgcgtacagcgacgattacagcttcttcatggacggcggcaaggagagccgcgcccgcagcgggcaggctgtcgacgagaatatgcgcggcgaggtctcgctcgtcaaggacctctcgcccgacttcgccctctttcaggaggtcgacatcgacggcacgcgcagctggcacatcgcagaggacgcttatctcagtgatgtgatggaaaacagcgaattcaacgagatcttcgcgcagaattatgacagtccctacctcttctatcctcttattaacccccacggcgcgaaccagtccggtatcgtgacgctctcgcgccacccgatctcttccgccgtgcgccgttcgctgccgatcgagacgggcatcatgaagcttgtcgacctcgatcgctgctactccgtcagccgcatcccgatggaaaacggcagggagctggtgctctataacctgcatctttcggcctacacatccgacggcacgatcgcgaccgagcagctgcaaatgctctgcgccgacatgctggcggaatatgaaaacggcaactactgcgtcgcgggcggcgacttcaataaggacctactcggcaattctgccgagatcttcggtgtcaaaggcggtgagaacgacacctgggcgcagcccatccccgaggggacgatccccgacgggctctcccttgtcgtgccgtttgaccccgaacaccccgtcgccacctgccgcacggccaacgaaccctacaacgaggagacgaccttccgcgtcacggtcgacggcttcctcgtgtccgacaacgtcgaagccgtctccgccgatgtcgtggacgcaggctaccgctactccgaccacaatcccatctatatggacttcattttgaaggcggaataaagcgtcaaaagtaaaggaagcgagcctcacggctcgcttcctttttattctctttcacttgagcagcgtcatcactgtgtcgtagatgcgcttggtcgcgtcgggaatgccgagcgccgccatgttttgagacatcgtctccatccgctgcggatcgttcaggatgcccgccgcggcggcgaagagcttcttgccgtcaaggccctcttccggcagcacgagcgccgcgccgtggtcgccgagcagcgccgcgttcttttcctgatggtggttcgtcacgttgggcgacggcacgagtattgccggaacgccgagcgccgtcagctcgctgagcgtggacgcgcccgcgcggcagataacgaggtcggcggcgcgcatgacagtcgccatgtcgtagatgtactcgcgcacgtcgagtgcgggatgctcagtgatctccaacccgtcatcgtgcatccactgctgcatcggcttccagcaaatttcgccgacgccgtggatgtggtagaaaggctcctttgcgctctcgagtgccagaaactccgccatcgcgcggttcatcgcgttcgacccgaggctgccccagaacgagacgatgagcttgcgtccgtcgttcatgccgagcttttcctttgcctgctgctttgtcactgtgaaaaagtcaccgcgcacgggcgtaccggtcacgaccaccttttcggggtgcttgtagtgcgcgcggcagtcctcaaagccaaccatgatgcggtcgcagtggggctccagctgtcgcgtcgtcagccccggcacgatgttcgactcgtgcaccgccgtcgggatgcccgcctttgcgccgtagcgcacaagcggatagctcgcgtagccgccggtgccgacgatcaggtcggggtgaaaatcattcaagatcgcgttcgcctcacgctcggcgtgggcgagatttttgagcgaaacaaggttgtgcttgatctccgcgggcttgaacgagcggtggaacgatgaaatgttcaccgtacggaacggatagtccgtgtgcgcgatcaaatcgcgctccagtccgcgctccgcgccgacaaataagatctgcgtgcccgcgtccttttcccgcatatagcccgcgagcgcgagcgcggggttgacgtgtcctgccgtgccgccgcaggtaaagatgaccttcatagccgctttctccttcccgtgtcagcgcatctggcgcgaaacactcagtacgatgccgacctcggccagctgcacggcaagcgccgtgccgccgtagctgaaaaacggcagcgaaatacccgtgttcgggatcagattcgtcacgaccgcgatgttcaggaatacctgcaaggcgatctgcgtcgtcacgccgacggcaagaaggcttccgaagcggtcgcgcgcgtgcagggcgatccagtagccgcggatgatgagcagcgcgaacatgaccatgatgatcgtcgcgccgacaaggccgagctcctcgcagatgatggcgaaaataaagtcgttgtgctcttcgggcaggaacagaaacttctgccggctcttgccaaggcccagtccgaacaatccgcccgaaccgatggagagcaagctctgccggatctgatagcccttatcgcgcatccactcctcgttgaacgggtcgagccagatgtcgattcggctcgagttgtaggtgatgatgccggtcgcaaaggcgtagatcaccagcagcaccagcgcaaagccgagacctacccagtagttgcggataccgccgacgtacatcatcaccgcgccgacgccgagcagcagcaccataccggaaaagtgcggctccttcgccatcagcgccgcaatcacgcagaggatagcggcatacggtacgataccttcacgaaatgtggccattttgtcttttttctttgaaatgctatcggcaaaatagaggataatgccgaccttggcaatctcggagggctggaactggaacgagccgatgcggatccagcgctgcgcgccgtgcgtcagtcggcccgtgccgatgcccgggatcagaacgagcaccagcaggatgatggaaaagatcagcagcatcttcgccaccgcgcgatagcgctcgtaattgatcttgccgacaataaacatcgccgtgataccgaggatcgcaaaaatgccctgacggatgaggtagtacgcggggttaccctcttcatagtaggccgaggggaagctggcggaaaacagcatgatcaggcccacgcccacgagcgtaagcaccagcagaagatacggaaggtccagcggtccgcggcccgcttcgcgcgccgccgcctcgatggccttcgcccgctcgcgctgctcctgccgcagcaagcgttcttccttggtcatgcagtcttccccctttcatactgattgcaaactcgcgctctgcgcgagtttgcctccattttgcaaccaagcgtcgcagactttcgcgcccgcaggcgcgaaatatttttaatcatttttcgccgcgaccggtgcgtggcgaaaaatacttctcgcagagtgagtgtcgagccgccaagggcggcgaggcacagagcgccgcgcatcccctctcatttttgagaaacggcaagccgtttctcaaaaatgaaatctgttgagtactccgaacagcgccgccagacagcacagcgcactcacgctggtgaacacagcgacaagcttcacctcgctccagccgcagagctcgaagtggtggtgcagcggcgccattttgaaaaggcgcttgccgtgcgtggctttgaagtagatgacctgcaaaatgtcggacagcgtctcgcagatgtagacaaagccggcggggatcagcacaagcggcatatcgtaggcaaaggccagcgccgccaccgtgccgccgaggaacagcgagcctgtgtcgcccatgaagaccttggcggggtggaaattgtagataaggaagccgagaagtcccccgacgagcgccgcagcataaatgccgagctgctcatagccctgccaccagatggcgagcacggtgaaaaacaggccgaccggcaccgtcacgctgccggccaagccgtcgatgccgtccgtgatgttgacggcgttgaccgtgccgacgatgacaaacgccgcaaacaccatgtacacccaccagctcatgacgatctgcgtgttgaaaaacggcacgtagaggttcggcgtcagcataccctcaaagcgcatcaggcagaggaacgcgaccgccgcggcgagctggagcaggaacttctggatggccgtgaggccgaggttctgcttgtgctttaccttttcaaagtcgtctaaaaagccgatgccgccgaagatcagcgcaaaaaagaagatatagaggtgcccaaagtcccccgccatcatgcccttccagccgcagatcagaatagagacgaagatgccgaggatgaacattaagccgcccatcgtcggcgtgccggcctttccggcgtgccaggtggggccgtcctcgcggatgctctgtccggccttgagctttctcagctcagggaccagaaattttcccgtgatcgcggagaccgcgaagctcagtatgcaggcaatgatgatcttcatgttcgttttccttcgccgcgtcggcggcgtccttcctttgtacttgcgcgaacctctcgcgcacgacctccctctcgtcgaggtggtattttatcgttccgatctcctgataggtctcgtgccccttgccgcagaggacgaccacgtcgctctctttcgcctcatggagcgcaaaaccgatggcctcgcgccggttctcgatgacggcgaacggcgttctgctctccaaaagtgcggggagcacatcgcgcaggatggcgtaaggatcttcggtgcggggattgtcgctcgtgagaacaacgaagtccgagagcgccgcggcgatgcggcccatgcggggtcgcttcgtcctgtcacggtcgcccccgcagccaaagagcgcgatgacgcgcccatcggcaaagccgcagaccgtagagagaatatttttgagcccgtcgggcgtatgcgcatagtcaatgatgacggtgaacggcgcactcagcggtacgacctcgcaccggcccttgacgccgacacattccgtcagcgccttcgccgcgtcggaaagcggcacgccgagcgcctgcacggcagaaagcgacgcgagcgcattgtagagtgaaaagccgccggggatgccgatcttcgtctcctcgtggtcgaggtcggtgcaggcggtgaagcgcacgcagtcgttttcgtagcgggcgcgccagccgacaaggtcgttcgtcatgccctgcccgaatgtgatccgctcgcccgtaaagcgggcgagcaagcgctccgtccacgcgtcgtcgccgttgacgcaggcgatgtcgcactggtcgaaaagcctcgacttcgcgtcgcagtaggcctccatcgtgccgtggtagtcaagatgatcctgcgtcaggttcgtgaaaacaccgatgcggaatcggattccttctaccctgctctgcatcagcgcgtgggatgagacctccatcacggcataggtgcagcccgcatcgaccatctgggcgagcaggcgctgcacggtcagcgcgtcgggcgttgtgcggtcggtcgggatggtcttgtcactgatcaaattctgattcgtgccgatcaggccgacctttgcgcccttcgtgcgctccaaaagctgtttgataagatacgtcgtggtcgttttgccgtttgtgccggtcacgccgaccacggtgagttttcccgccggagtaccataccataccgccgcgcaaagcgcaagcgctttgtgcgcatctggcactaagatatagggaatttccgtctccggcggatgctcgcacacggcgcaggccgcgccgcgcgctttggcttcggcgataaactcgccgccgtcctccttctcccccggcagggcgaagaagaggaatccctcttctaccttgcgggaatcgagcgcaaggccgctgactatcaggtcaggcggcgcatgcaccgttttgtcttctaatgcggaaataagctcagataactgcgtttgaaaaattcctttcggaattgggtcttgctgtctttagtcgcgcaccgagctgtcgctgaactggacgcgcacgaccgtaccggcctcgacctccgtgcccgcggcgatgctctgcgagatggcgcgcaccgtggacgagcttgcgttcgtcgcgccggaaacgcccatgatgagccccgcgttcacgatcttctggttcgcggtcgcggcgctgtcgcccacgacgttcgggacgatgcacttgtcagtcgacttctccgcgccgaggtagaggatgatctccgcgctattcggtacgatcgcgccgcccgcgggcgtctggtcggtgacggtatcgccgctgccgacggtgcggaagctgaagccgttcgcgctcaggcgctcggccgccgcgtccttgctgaggccgacgacgttcggcacagtcttatccgcgccgacgagctcttcagcggtgtagctcggctcaatgccgagatacggcaggatctcgcccatgacggaactcgccacgggggcgaccatgttaccgccggaaacgtaggtaccggtccacttgctcggctcgtcgagcgtcaggagcatcatcacctgcgggtcatccgcgggggcgaagcacacgaacgagacgatgacgccgccgccgaccttatcggccgtgccggtcttgccgccgatgcggtagcccgcgacctgaccgttcttgcccgtgccgcttgtgacctcatactccataatgtcgcgcacgagcgcggacgtctcctcggagacgacctggcggatgggcgtggagtcgtgcttggagacgacgttgccatcctggtcggtgatctcttcgacaagatagggcgtgtagaggtagccgccgttgacgcaggcgcactgcgccgccagcagcgcgatgggcgtgacgttgaagttctggccgaaggcgtagcacgccagcgccagcgtcgaatatttaatttcgctgttgacgaagccgctggcctcgcccgtggtgtcgatgccggtcttctccgtcaggccgaagtccagcatgtactggtagaacttgtcgttgccgatgcgaaggccgatgttgatgaacgcggggttgcaggagtttgcaaacgcctgcgtcaggttttgctggccgtgaccgggcgcgcgcttggagcagttgatggtctcgccctcgatctttacgctgccgctgcaatagaagcccgtgttcaggtcgacaacgttttcctcaagcgccatcgcgagcgtcagtgttttgaacgtggagcccggctcgtaggtgtcgttgatggccttgctgcgccactgtttgttgagaagatccttcatgttctcctcgatctgctcctccgtcatgccggaggtcagaaagtcgttgtagaccttgccgggagcgttcagatcgtaagtcgggagcgacgccatcgccagtaccgcgccggtgttgacgtccataacgatgccctcggcgcccttgccggtgccaaagcgcgcctcgagctcctgcacacctttctcaaggtaatactggatggtcgtgtcgagcgtcgtgtgcaggtcgcagccgttttccgcgtcgaaatactggtcgtactggtagagcacggagcggccgtcgcggtcgcgcgcggtgacgaccataccgttctcgccggtcagctcgtcgttgtacgccgcctcaaggcccatcgcgccgccgaggtcattggtaaagccgatgacctgtgaggcgagcgtccccttgggataggtcctcttgctcgtcggacgaatgaaaacgcccttgaggtcgttctcattgatgaattcgcgcaccttgtcggcgagctcatcgtccgcctttttcttgagctcttcgtactgcgagttcgttttctccatctttttgaggatgtcagcggggtcaaggtccagaatttcagcaaggccgcccgcgatcaggttttgatcctgatcgttttcgatgatctccttcggagagatgaaaatatcctccgccgaggcggacatcgcgaggatcgtgccgtttcgatcgtagatcgtgccgcggctcgcctccaccgtggtgcgcaacgtttgctggcgcacagcgacggactggagctcgtcatgctcggtgatctgccagcgatagagttgggtgaagagcagcacaaacgtcagcacgccgaacacgcccagaagcagcagcgttcttgtctgaatgatgcggtttgcgcggcgcgcggattcgggccgtcttttctggttctgggggcgtggtgccacagtcgttcatcctccttaaagatggaaaaggagtaaggaagctccttactccttatgtatagcttcgctcatttgaaatattccaccactgcgcatacgccgttgccaatcgacgtgagcacccgcgacaaaacgttctggctcttctgctggtagacgaccacgctgtcgggctccgacaggtcgatgtagtagacctgcgaggcgctgggcttggccataccggctgcggccgccgcctccttgatggtggtgaggtcaaaggttttttcgtagcgcgtgagcagcgcgacatgctcgtcctcgagcgcggagatctccttctgcacggagacgacctgcgcggagatttccgtcagctgtgcgcggcacatgatcatcagcgcgaccattgcggccagcgccataaagccgcacagcgtgccgagcgagaccttttcgcgttgacggcggacgggcgcagcctttttctgcaccttccgctgcgggggacgcatgaattcctcgcgctgacgctcgtgctcgcgctcgtattcacgctcgcggcgcagcctgcgctgacgctcttcgtaggcgggatcgtaagcgagattgccattgactcgtccgctgtagcggcggtatttcatgttctgctctctgcggctggccatggcgatctcctttcttttgcgtattttcggctgttgtcagcacttttctgcgacgcgcagcttggcgctgcgggcacggggattctctgcgagttcttcttcgcccgaaacgatgggctttcttgtgatgagcttgacctttggctttcgtccgcacacgcacaccggaaattccggcgggcagatgcagccctgtgcaagctcctgtaatttcttcttgacgatgcggtcttcgagcgagtggaacgtgatgaccgcgagccgtccgcccggtttcagatttttctccgccgcgtcgagcatcggcggaagctcgcccagctcatcgttcacggcaatgcggatggcctgaaagctgcgcttggcagggtgctgcttttcgcgcagtgcgctcgcgggcatggccgaacggatgatatcggcgagctcaagcgtcgtttcgatgggcttttgctcgcggtgctggcaaattctcttcgcgatggcgggcgcatagcgctcctcgccgtattcaaagaggatgcggcgcagctcttcataagaataggtattcacgacctcgcgcgcggtcagtgcggcggattcgtccatgcgcatatcgagcggcgcgtcctgcttgtaggaaaacccgcgctgcgcttcgtcgagctgcggggaggaaacgcctaagtcaaacagcatcccgtccacgccgtggacgcccagctcgtgcagcacagcgtcgagcgcgctgaaattgctgtggacgagcgtgaccttgtccaaataatcgccgaggcggcggtttgccgcttcgatcgcggtctcgtcacggtcaagcgcaatgaggcggcccgtcgtcaggcggcgcacgatctcgagcgaatgtccggcgcggccgagcgtgccgtccacatagatgccgtcgggcttgatggcgagcgcgtcaaggcactcgtgcagcagcaccggcttatggccgtagttctcttccatatcagaatcccagctcttccatcacggcggccagattctcgggattgagctcctcggcctcgatctctgcccacttctccgcattccagatctcggcgcggttcgaaacgccgatcacgaccacgtctttttcaaggtgggcgtaggctctgagcttctgcggcaggacgatgcgtccctgcgcgtcgggctcgcacttggcggcgttggcgaagagcgggcgcatggccttggtcttcgtatagggcaggctttcaaacttttcggtgaagcgcgcccaggaggcatcggaatagatgctcaggcaggagtccatgcccatggtgacataaaacgtgtcgccgagctcctcgcgcagcttcgcggggataaagagccgccccttggcgtcgatcgtgtgctgatactgacccgtcacggcggctgacctcctttttctgtgcattttcgcatacagagggcacgaaagcgcggccttttcttcattttggaaaaagccgtgccgcgtccgatctgatgcttatgtgggaaagtaagccattttcatggtatgatacaccactttcccccacctttgttttgagtatacgagattcacataaaaaatgcaagcagaaatttccctgagatttcaagccttttaccgctttttcctgtgaaaattcggccagtgcaccgcatttttaaaacgcatgttctactttggttttggttaaaaaagggccgccacaatatcttgtggcggtcctttatgctatgcccaaatatagattatgtctaccaaacacgtcggtttttgtcacttttgacaaaattttatccgttctgcgtctgcttttcagctgactgtgccagctcctcgcggcgcttctgcatctgctcggcagaggcggcacggaagcgcacgcgggactgcttgacctcctcgagcgccatctggatggcctcctcggtgcggcgcagtgcatcctcggtgtactcgttggccacgcggtacatttcgcgcgagcggtcctcggcctttttgatgatctcgtggctcttttcgcgggcgataccgagcacctcggtctcggagaccttgttcttcgcgtcctgctcggcctgctgcatcatgcgctcgacgtcgcgcttggcagccttgacatagtcctcctttgcgcggatgagctcctgcgcgcgggaaagctccaccgggagctgggcgcggatctcgtcgagcaggtcgagcgcctcgtcgcggttcagaatgcacttgtcgctcgtcagcggcgcgttcttcgcgccgtcgatcatctcgtaaagcatatccaaaagatgctgcacatcattgttcgccatggtcttctctccatcctttcacaagctccgccgcgcgcagcggcatatatttttcaaggtcttgtccgtatttgatcatctcgcgcaccatcgtggagctgatgtgctgaaacttcggctccgcgatcagcagcaccgtttcgagcgcgccgtccgacacgtcgcgatagatgagcgagagctgctgctcggcgtcaaaatccacgctgttgcgcacaccgcgcacgagaaactgcgcatttttacgcagcgcgtagtcggtcagaagtccgccgccgagctcagcctccacattgggaaactcctcgacgctcgcgcgcatgagcgcgagcttctgctcgtctgtaaacatcgggtgcgtcttcgtcccgttcggcacgatggacacgtacacgcggtcaaagagctttgacgcgcgcgcgataatgtcctgatgcccgatcgtcacagggtcgaacgagccgggaaacactgcgattctcatgcctcttcctccaccgcgcggtgatagatgctcaccttgatcttgccgtagcggtactcgcgatacagtccgtacggcgcgggaagctcgggaagcgtctggttctgcggactttccgcgaccattataccatggggtgataaaatgtcaaactgcgcgatcttttccatcgcctgctccaaaagtccgctttcgtacggcggatcgaggaagatgatgtcgaacctcccgctctgcgtgccgagcgcggcgagcgaatcaccgcagatgacctgcgcgttttcttccagatggcacagcgcgagattttcgcgcacgagcttgaccgcgtctgcacgcttgtcaacaaaaagcgcgctttttgccccacgcgagagcgcctcgatgccgagctgccccgtgcccgcaaaaagatcgagcacgcgcgcatcctccacgtcgaactggatacaattaaaaatactttccttgaccttgtcggtcgtcgggcgggtctccatgcccttgagctcgcccagccgccgtccgcgcgccgagcctgtgatgactctcatgtttatccctccgcagcgcccaaagcgggcgcaatgaactcgttagtttccataatacgtgaatttccgtttattttcaatagagtccttgacattttcccgcattttacgcaaaatattttctcttgttattctgcaccgcttcgtatataatgatatggtcatattatatcgaccagggagaaaggagtatcttccatgatcaggctacaaaccgaaaagggcgaagtcagcatttccgacgccgccctgtctaatatcaccggcgccgcggccacgagctgctttggtgtcaagggcatggcctaccgctcgatgaccgacgggctcgtccacctgctgcgccgtgaggcgatgagcaagggcgtgcgcatcattccccacgaagaaggggacatttccatcgagctgcacatcgttgtggagcacggcgtgaacatcgccgccgtctgccgctccatcatcaatcaggtgcgctatatggtcagcgaaaacaccggcgcaagcatccgcagcatcgacgtttgcgtcgacagcatgaatctgtaaaaaccgaggaggacatcatcccatgcacgataccatcaatggtgccatgttcaaggagatgctgctcttcggcaccgtctccatcgcacaggcacagcaagctatcaatgatttgaatgtattccccgttcccgacggcgacacgggcacgaacatgagtcttaccatccagaccgcggcgcaggagctcaagaagatcgagcccgcgacggtcgatcaggccgcctctgtcacggcgtccgcgctgctgcgcggcgcgcgcggcaactccggcgtcattctgtcgcttctcttccgcggcatcgccaaggagctcaagggctgcaaggaggccgacggcgcggcgtttgccgccgcgcttcaggagggtgtcgccgcggcgtataacgccgtgatgaagcccgccgagggcacgatcctgaccgtttcgcgtctcgctgccgagcgcgccgtgaacgcggccgaggagcacaacagcgtcgagtacgtcatcgagcaggccatcgcccagggcgagatcacgctcgcgcagacgaccgacatgaaccccgttctcaaaaaggccggcgtcgtcgacgcgggcggcaagggcttcctgctgattctcggcggtatgctcagcgccctgcgcggcgaggagcgtcccgagctcaccgaagagaatgcacaggagaaggccgattttgccatgctcaacgaagaggacatcaccttcacgttcgacaccgtgttcatcgtccgcaagagcggacgcagcattgagccgttccgccgcttcctcgacggcatcggcgattcgctcgtcatcggcgaggacgacgaggctttcaaggtccacgttcacaccgacattccgggcgaggcgctgaccgaggcgcagaagtacggcacgctcgagctcgcgaaaatcgagaacatgcgcacgcaggcccagcagctcgccgccggcggcaaggcccagtccaccgacgaccttgaggccatcgaacaggagctcgaagccgccgagcacgaaaatgccggtgaagccgagcctgaaaaggactttggcttcctcgcggtctgcgcgggtgagggccttgcgaacgtcttcaccgaccttggcgccgacggcgtcatcagcggcggacaaaccatgaatccctcgaccgagagcatcctcaaggagatcaaaaaggtccccgcgcacaccgttttcgtcctgccgaacaacaagaacatcatcatggccgcacagcagtgcatcggcctgacggagaagaccgttgtagtcatcccaaccgcctccatcccgcagggcgtgagcgcgatgatggccgtcgatcccgacatgagcgacacagacgccatcgccaaggcgatgacggacgccgcgcagtgcgtctccaccgcgcagatcacctacgccgcgcgcaattccgattttgacggcttcgacatccacgagggcgattatctggcacttctggacggcaagctgctcggcaccgaccgcgacgtctccgcgctgctcgacgggctctccgacgaggcagcgtcccgcgaagcggagttcatcaccgtcttctacggcgaggatgtgaatgaagaggacgcgcacaaggcgtgcgacgccttcacccgcaagtgcccggatgccgaggtcaatctgatctgcggcggccaaccggtctattactatatcatctcgatcgaatgatccaagcacagcaaagcggagcaggatttcccctgctccgcttttttctgcccgtcagacattcatcttccgcccgaggagcttcatcaaaagctctgcgtggcggtattcgtcttcgctcatcgccgcaaacagcttgctgaggcacaggtccagtgtctcctcccccgcgcgggcgtaattgtagcccgcacaggcctccgcgtggtagaggctgcgcagcagcgcgcagaggtcgcacgtatccggctgctccacgcacacgcgcgggcagtaggccttgccggtgattaagtagatcgcggcagccagatcgcgcgcgtggcgcttctcgtcctcgctcagcgcgcggaaggctcgcgccatctcgcgccgcggcgtgcacgaggagagatacgcgtacacctgcgcgtcgccgagctcctcgcgcagaaagccctgcagcacctcgaccgatacgcttgcctcgctgcccatgcagcaagggtccgcctccgcgcccgggagcgtgagctcgctatcctgtgcgctcatctgtgtgtttgcattgtccgccatcgggtacgggtcctcccccggcgcgacgcgcttccacacctcgcggcatgcttcatagtcgcaggcgcagggcttttttatttccgtcatgttcttcttcccctttccggaacggttctcgtctctatcctatgcatgcatttttcaggcgtgcagagccgatatttccctatttcccgcagggaaaaagaaaatcttgaaaatcgcacctctctcgttgattttttccattttttctggtaaactacatttgttttgtatttttgcgcattttgttgcatttgcaacttttcattctctgccatccggtccatactaaagacaagcaatggcagtttctgtaaggaggtcttcttttcatgctggaactgaagcacatcacctataccgtctccacccctgagggagagcagacgatcttaaacgacatttccatcgacattcctgaccgcaagctcatcgtcttcaccggccccaacggcggcggcaagacgacgctcgccaaggtcatcatgggccttgtcacgccgacgggcggccagatcctcttcaacggtcaggacatcacgcaccttggcatcaccgagcgtgctcggctcggcatcagctacggctttcagcagccgccgcgcttcaagggcatcacggtgcgcaaccttctgaccatcgcctcgggcgatgcaaacctcagcaaggacaagtgctgcaagtacctcacgcaggtaggcctctgcgccaacgactatctcgaccgcgaggtcgacgtctccctctccggcggcgaggtcaagcgcatcgagatcgcaacactccttgcccgcggcagcgagctgatgatcttcgacgagcctgaggccggcatcgacctgtggagcttcgcccgcctgactgagacgttcgagcagctgcgccagcgcgagcttgcgacgatgatcatcatctcgcatcaggagcgcatcatccagctcgccgacgagatcgtcgtcgtgggcggtggcgagctcaagcaccgcggcagcacagaagaaatttttccgctcatcatggcggacacgctgggctcctgcccggtgctgaacaagtaaggaggtagtacacaatatgatcaccgaaatcgacgcttccctgcttgaaaagatcgccgacctgacgggcaagcccgtcggcgcgttcaacattcgaaaggacagcggatgcgaggcgcgccagtccaccgagcacatcgccatcgacccgcagcccgagggtaaaagcggcatcatcatccgcatcaaggacggtacgaagggcgagcagtgccacatccccgtcatcatcagcaagagcggcgtgaccgaaatggtctacaacgacttttacgtcggcgaaaactgcgacgtcgacatcgtcgcaggctgcggcatccacaactccggctgcaacgagagccgccatgacggcatccacaccttctacattggcaaaaactcccacgtgcactactcggaaaagcactacggcgagggcgacggcagcggcacgcgcgttatgaaccccaccacgatcgtctatcttgacgagggcgcgaccatccagatggataccgtgcagatccgcggcatcgactccaccgtgcgcaagacgaagatcgtctgcggcaagggcgccgaggccgtcatcaccgagcgccttctcactcacggcaaacagcacgccgagagcgacatggagatcgagctcaacggcgaagatgcgcgcggccgcgtcatctcccgctctgtcgcgcaggatgagtccaagcagatcttccaccccgtggtcgtcggcaacagcaagtgcttcggccatgtgcagtgcgactcgatcatcatgggcaaggccacgatcgaatccatccccgccatcaccgcgaattcgaccgacgcgcagctcatccacgaggctgccatcggcaagatcgcaggcgaccagctcttaaagctccagacccttggtctcaccgaggaggaggccgaagacacgattctcaagggcttcctcgcctgaaaaatttgataggaaccgacgaaaaagcgcgacgcccgagatcgggcagcgcgctttttctgttgctgtgttggttcaatcggtgaaatcaggataaccgtctttgagagactcatcgtagatcgcacgctcgccgccgatgaatttgggacgcgtccgcgcggccagcacaatggcctgaccgatgcggttctgcttcaagcgaacgggaacggcgacctttttgaggtgcatgccgatcagcgtgccgccgatgtcaagtccggcgtcggcgtgtatctcttcgagcgccacgggatggcggaacgctttgtacgcggccgtcgcaaacgagctgcccgccttgggctgaggcaggacgttgacgatctcgccgttcggcacagcctcgtgctccacgatcagcgcgcggttcaaatgttcgcagcactgggcggcaagatacacgcccatgggcgaaaatacgctagagagccctcggaagatggcatccgccacctccggcgtcgaccagctgccgacctgatggcccacgacctcgctcgtgctgcagccgatgacgacgatctgtccgcggcgcagatgtgcgatctccgcaagctcgcgcgccgcctctgccgcctcctgctccgcctgttccaccagacgatgattttctacctcatgtacgattcccgccatgatctgacacctctttagaaatttattatgccagcttctccgtcaccttggcgcgctcaagcaccgtgaccagcagcacgccgaccacgaggccgaccgcaccctggaagatgttgccggggatgcttgccgcagcggcaaggcccttgcccagcaggagagaagcgtagccgaaatagccgagcaccatgatgatctcgctcacaacgccgctggcgatgcgggaggtcgcagtgcggcccatcttttcatacatcagcgcagcgaccagcgccatcacgcccttgatgaccagggtgcccggagcgtagtgcgcatagccgaggaaaatgtctgccagcatcgagccgatgccgcccgccgcaaagccataccaggggcccagcagccagccggacagcagcacgaagcagtcgcccaggttcacatagccctgcatcggagaggggatctgcacgaccatcgtcgccacgcagacaagcgccgcaagcagtgcggcaaggacaagctttctgatctttttatcgttcatgattgggtgctcctttgttttggttgttggccgtattatatcccgtcctggtattattcatatagtcaaaacaaaacaaattatgcagaccagatttgccctaagctggaaaaaagcggcgcagccagagctgcgccgcacattgggaaggatttagtcctccttggtctcctcggcttcagaaggctccttgggttcctccgcagcgggcgctgcctcttccgcgtccttctcgatggtcacctcgatgatgggctcctgcgccttcttggcagcggcagcctcagccttggcggcctcgtaagcggcgagcttctcctgagaggccttgatggccgcgacgatatcggcgaccgcttcgggcgcgtcaccctcgagcgtggagacataccactcgccgatggcgcggtaattcttgtccatgctgcggcgctcagatgccatctcatactcggtcttggccttatcggcaacggcatttgccttttcaccggcaacggccgcgacctgctgtgccttctcagtcgccacaaacgcgacgtcctgaaccttcttgctgaagttatcgaaaaatgccataatactttctcctttcaaaccgtgtcctcaggtttgttattgacagtataagctaccggggctttcatttcaatggataatttacgacaaaagtataaattttttgtgacagcgttcactttttctcgacccagccctgcgcgcagccgacggcgcgcttccagccgcggtacagctcctcacactcgtactgcgcccgctcgggggtgaagacgcgctcgctgcaccggagagtgctcagctcgtccaagtctttccacacgcccgcggccagacccgcgagcgatgccgcgccaaacgccgtcgtctcgaccatcgcgggccggtcgaccggaatgcgcagcaaatccgcctgaaactgcatcatcaaatcgctgacgctcgcgccgccgtcgacacgcagaagggagatctcgcagcccgcgtcctgccgcatggcggtcatcaggtcggtgacctgataggcgatggattcgagcactgcgcgggcgaagtgcgccttcgtcgtgccgcgcgtgatgcccacgacgcagccgcgcgcatacatatcccaatacggcgcaccgaggcccgtgaacgcgggcactaagtaaatgccgccgctgtcgggaacggattctgccagaatgtcgcactcgtgcgaggtcgaaatgacctgcagctcgtcgcgcagccattgaatggccgagcccgcgttgaaaacgctgccctcaagcgcgtaggtcgtctcgccgttcaggctccagcccacggtcgtcaccagtcccgcgcgcgagcgcaccggcgcgccgccgacgttcatcagcgtgaagcagcccgtgccgtaggtgttcttcgcctgtccgcgcgtaaagcagccctgcccgaacagcgccgcctgctggtcacccgccgcgccgcagatcggcacgcccgcgagctcttcgagcccttcgatgccctccgccaccgtgccgtagacctcggagttggacacgggacgcggcagaatgttcatcggaatgtccagcagcgcgcagagctcttcatcccacgaaagcgtgtggatgttgaagagcatcgtgcggctggcgttcgagtagtccgtcacgtggaccttgccgcccgtcagcctccagatgagccatgtctccaccgtaccgaataaaatttcgccgcgctcggccctttcccgcgcgctggggacgtggtcaagcagccacttgatcttcgtcgcggaaaagtaggcgtcgatgtgcaatcctgttttctcggccacaagctcgctcacgccgcgcttttcgcgaagcgcatccgcgatgtccgccgtgcggcggcactgccagacgatggcgttgtggatgggctcgcccgtcgcgcgatcccaaagaatcgtcgtctcgcgctggttcgtgatgccgatcgccgcgaccgcgcggccaaggcccgattcgcgcaaggcctgcgcggcaacggcgcgctcgctctcccagatctcgttcgggtcgtgctcgacccagccgggctgcggataatactgccgaaacggctgctgcgcgtgtccgccgacgctgccgtcgcgcccgaacagaatggcgcgcgagctggtcgtaccctgatcgagcgccaaaatataccgctgcatgaagatacccccttgttcatttggactgtcttatgctatactaatgaataagattatatcatgcaggaggtttttgcgccatggctatttgcagggaattttacttcccctcgtcggacggctcctcgcgcattcacgcggcggagtggacacccgagagcggtgagatcatcggcgttttacagatcgcgcacggcgtggcggaatacggcatgcgctacgcgccgtttgccgaattcatgaccgagcacggctttgccgtcgtggcgaacgaccacctcggccacggcctttccgccgagaaggacgccgacacgctctatttcggcccgcgcgacggctggaagcatgttgtggacgacatgtacgccctgcgctgccgcacgaaggaaaaatatcccgatgttccctattttctcatgggccactcgatgggctcgttcctgacgcgcacctatctcatccgctatcccggcaccgtcgacgccgccatcatcatgggcacggggcaccagtcccccgcaatcgtcgcgggcgggcgcgccattgccaaggccgcgggcaagcgccacggcttcaaggcgcactctccgcgcgtggaggcgctggctttcggtgcttacaacaaggcgttcgcgcccaaccgcaccgaggtcgactggctcagcgtgagcgacaacaatgttgacgcctacattgccgaccccctctgcgggcagaagacgagcatcggtctcttctatgagatgctcggcggcatccgcttcatcagcacgccaaaaaacatcgcgtcgatgaaccgcaacacgcccattctcttcatctccggcgatagggaccccgtcggcgagatgggcaagggcgtcaagcgcgcatatgaggctttccgccgcgccggcatgcgcgacgtggagctgaagctctacaagggcctgcggcacgagattctgaacgaagactgccgcgccgtggtctataacgacctgtggagctggatcgaaaaacatttatgaataaagtcaggaaggcgaaccgtcaggcggttcgccttcttttacttcggagcaacgttcgcggcgtcaaagcgtcgatatcgtgcgtcgtgagcaggacgcgcgcggtcaggatgccgtcaagcgtgacgaggaacaccgcgagcgccgcggcccactctggaagcagtgcggcatagccctccagaaccggctgcacataccgcacggcgagcatcgacaaaatcccccagcagatggaaaacggcaagcagatgcggccgttcacgtcgcatttggtcgaagaatagtcccagaactgcacttgaaacagcctttcatagccccagtgcacggcgtattccaccactgttgccgcaagcatcccgagcagaagctgttcccatggccccggcaggcgctgcgcccccagcaataagatcgtgaccatcgcaaagccgtacaccggacacagcggcaggaacacgaagcatcgccgcagccggtggcccgagcttgtcgccgcggcgaagagcttttcgaggcaatagccaaaaaagctgtaagcaaaccagtaccagatatgatccatttcttcctccgtgtccgtttttctcagtatggcccgcgcagatggaaaaatgcgcgatgcgcgcgttgcaaagcgcggcgaatcatggtaaaatgacaaaaaatcgacaggagaacacaactatgcctgatacctgggaagctctggaacacgactgtaaaaattgccgcgaatgctcgctgtgggagacgcgcacgaacgtcgtcttcggcgtcggcaatcagaatgctgaagttttattcatcggcgaaggccccggcgcgaacgaggatgcgcagggcgtgccattcgtcggcagggccggtcatctgctcgacgacatgctcgagatcatcggcctcaagcgcgacgatgtgtatatcgccaacatcgtcaagtgccgcccgccggaaaaccgcgacccgctcggcgtggagcaggacgcctgtatcgggtatcttcgccgtcaggtcgcgctgctgcggccgaagattatcgtctgcctcgggcgcatcgcggccatgcgcatcatcaagcccgacttcaagatcacgcgcgagcacgggcagtggttcgaaaagaacggctttcagatgatggccgtgtatcaccccgcggcactgctgcgcgatccgcgccgcaggcccgagtcgtttgaagatttcaagggcttacaacagaagatcaatgagctttgcgaacacacccatgccgtttcctaatgcaaatagcatacttttcggtgctgcgccctgccaaattcctacataaatagtgttttttggataaaaatgctattgacggccatttttgtgtgtgctatattactaccatcctttttgaaaggacttggagcttgagtgatgaagactgttgtaagcaacgttgcatatcgcttttactattactcttacttttactttaaggacaaggtaagagcgatttgtgatgcccgtagctgaaaggtctttcgaaccaacacttgaaggtcacttcaaaaagagttgagtcaaggaacccgccgtatggaccacaagtccttacagcgggttttattgttatcagcgagaaataaaaattggaggaaaaaaagcatgaacaccaaacgcatcatttctcttgttgcctctcttgccctcgttctcagcctgagcgcgggtctgaccggctgcggcgataaggccgcacaggacggcaatcagggcagcaccgacggcgaaggcacgaagtacaccgtcggcatctgccagctcgtgcagcacgaggcactcgacgctgccacccaaggcttcatcgacgcgctgaatgaggcgctgcccggccaggtcgaattccagaacaagaacgcttccggcgacagcgccaactgctccaccatcgtcaacggcttcgtttccgacggcgttgacctcatcatggcgaacgccacgggcgcgctgaccgccgccgctgccgccacgagcgacattcccatcctcggcacctccatcaccgcttacggcgtcgcgctcgacctcgatgacttcaacggcactgtcggcggcaacatctccggcacctccgacctcgctgacctcgaggctcaggccaacatgatcaccgaatggttccccgatgccacgaaggtcggcctgctgttctgctccgccgagcccaactcccgctaccagatcgaagcggtcgccaagtacctctccgacaagggcattgagacccaggagttcgccttcactgacacgaacgacgtcgcttccgtgacccagtccgccgccgactactccgacgttgtctacgtccccaccgataacaccgccgcttccaacaccgaggccatcgcaaacgttctcgttcccgcgggcgtgcctgccatctgcggcgaagagggcatctgcaagggctgcggcgtcgcgaccctctccatcagctactatgacctcggcgtgaccaccggtaagatggccgccaagatcctgaccggcgaggccgacatctccgagatgcccatcgagttcaccgaggccaccccgaagtacaacgcctccatgtgcgagacgctcggcatcgagcctctcgagggctacactgccatcgaagagtaatctgatcacatccccccgcaggcagggacgggcttagcccgttcctgcctcaacaagagataggaggagagaacccatgagttttctttcgtcgctgatgaacgccctgcccggcgctgccgcacagggtctcgcctggggcattatggccatcggcgtttacatcaccttccgcattctggacgtggcggacctgaccgtcgacggctcgctggcaaccggcggcgctgtctgcgtcatgctgatccgcggcggcttcaatccctggatcgccctgctgtgcgcgatgctcgccggtatgctggcaggcctcgtcaccggtcttttccacacgcgctgcggtattccggccattctcgccggtatcctgacgcagcttgcgctgtattcgatcaatctgcgcatcatggacagcaaggcaaaccaggcactcagcgttgataaatatccgctgctgctttcgcagcgctatgtgcgcgagctctcgatgaacaatcccctgccgctgctgcttctcttcacagccgcggtcatcgccatcctgtactggttcttcggcacggagaagggcagctcgctgcgcgcgaccggcgcaaacccccacatggcgcgcgcacagggcatcaacacaaactcgaacatcgtgcttggcctgatggtctcgaacggtcttgtcgccctctccggcgcgctgctggcgcagtatcagggctcgagcgacatcaacatgggccgcggcgccatcgtcatcggccttgccgccgtcatcatcggcgaggtcatcttcggcaagatcttcacgaacttcggcctcacgctgctggccgtttccatcggcgcgatcatctactacatcgtgctccagatcgtgctgcagctcggtctgaacaccaacgacttaaagctcatcacggcgctgatcgtggcggtcttcctcgccatcccctactggaagagcaagatgttccgccgcaaggtgcagccccagagcgcaaagaacggaggcaacggccatgcttgaactcaaggaactttataagacctttaaccccggcaccatcaacgccaagaccgcgctgaacggcctgagtctgacgctgaacgacggcgacttcgtcaccgtcatcggcggcaacggcgcgggcaagtccacgatgctcaacgccaccgccggcacgttctttgtcgactccggcaaggtcatcatcgacggctccgacgtcacgaacctgcccgagcacaagcgcgcggcattcatcggccgcgtgttccaggacccgatgatgggcaccgccccctcgatgtggatcgaagagaacctcgccctcgccgcccgccgcggccagcgccgcggtctttcctggggcgtgacgaaagaagaaaaggagcagtaccgtgagctgctcggcggtctcggcctcggtcttgagtcccgcctgaccaccaaggtctcgacgctctccggcggccagcgccaggcgctcacgctgctgatggcaacgctcaagcgccccaagctgctgctgctcgatgagcacaccgcagccctcgacccgaagaccgccgccaaggtcatggagctcactgaccgcatcgtgcgcgagggccagctcaccacgctgatgatcacgcacaacatgcgcgatgccattcagtacggcaaccgcctcatcatgctgcacgacggccacgtcatcctcgacattgcgggcgaggagaaggagaagctgaccgtgcccgatcttcttgagcagttcacgaaggccagcggcgacgagttcgccaacgaccgcgcgatcctctcctaacgttttctctctcccctataaagcacaaaaagagcctgaacgctttgttcaggctcttttcttatcctttttacgcctcccgcagcacgacctcgacaatgccgacgtcatcggtatcggggtagaagttgacctgccacggctcggtaaagccggggtcgacctcctcctgcacagaccgcaccatgtcgcggatgccgtcacggtccgcggtgaagtacgtgaagcgcatggcgatacggctgagcgaaccctcgcgcgccgtcaggcgcagaaggtcaggcagcgcctcggtgctcgtcgcggtgacaatgcccgcctgctcctccgccgtgcggcggtagccgaggcgcacgtgcatctcgtaataggcgcactcctgcgtgtcggtgtagctgatgtagtcaagaagatacgcgcccagtgccgtctcctcctgcacctccttacatgcctgctcggccatggccgcggcgtcttcctcgctgtaaatacgcacaacgccttcctcgctgtgctcgccaaggagcagcagcagcgcattgacgaggtcctgatagctgtcggcgcgcagggtgtccgcaccctcgttttcccagtagacctcgctgtgcggcgcggagacgctgtaggaacgctcaagcacgacgttgccgccgcagcccgagagcgtcaggcagagcgccagcgaaagtggaatgaactttttgcgcacggcgctccctccttttgggcgaaatttctctttctcagtagccgagcggctcgtcgacgagcacgacctcggtctcgcagctgcggatggcctcccacagcacgacaagaccgcggcagatgcgctgcgggctcttgcagtcgtagcagcggtcagccttcacggcgcagggcgttttcacgccgaggcgctgcgcgtttttcggtgcagcaatgttgcgggcgcgccagagcgcttcgtcataggtcggcgcgatcttgttgctgccgacgacgaaccacaccctcttgtggccatagagcgacgaggacacacggttgcccgtgccgtcgatgttgatgatctcgcccgtttcggcaaggccgttggccgagagcagatagttgtcacacgtcgaggcgtttttgagcacctcggcggcgctcatgccgtccggcacgttccaatggctgtagatcgcgttatgcgcgccaaggctttcaaaaagccccatctccgagagcgtcacgctaccgccgaacgacacgcttgtcccgtcgatctgcgcgttgagatagtccgccgcttccttcgccgtcgcgaaggcggacaccttgaacccgcgttcctcgagattcttctccaccgttgtaaaatccattcctgcttcctccttgtatcctgatatccttagaggccctgcgggtcgtattcgccaaagccctcaccgagcacctcgctcgcgtcgcagacaatgaaaaaggcgtcggggtcaagctctttaatgtagcgcttgatcgaaaccgcttccttcttgcggatggcgcagaacagcagcggacgctccgcgcccgtgtagccgcccttgccgttcaggagcgtcacgcccatgtcgcgccgcagcatctcctgcataatctcctcatacttgtcgctgatgatgtaggcgacctttgccgtgttctggccgtagacgaccaggtcgagcaccttcgtcgtgatgtagagcgccagcgcgccgtagagggcgttgttgaggctgtggaacaccgcggcatagatcaggatgatcgtcaggtcgatgccaaggcagatgttgccgatcgacaggcgctcaacgtgcgaccgcacgatccatgcgccaagctccgagccgccggtcgtcgtctcctcgcggaataaaagtcccgaggcgatgccgagcgtcacgccgccatacaggcacgcgagcagcgggtccataggcgcaaattcgtggagcgccgcgacaacgtcgatcaaaatggagctcagcgtcatcgtgtagatggacttgcacaaaaacgcgaaaccgaattttttaagccccacgataaaaagcggcacattcagcacgatgaccatcgtaccgatcggcagaatgggtgcaaaaaagttaatgatctgcgaaatacccgtaaagccgccgaccgtaaagccattcggtgcatagaaccaatcgaacgacaaggcatacagcacgcaggcaagcgtgacaatgatatagcttttcacctgctcgcgcagttttttatttttcataaattttctcccctcacatgtttctctcaggcttccgacgtcaaatcagcgagagctgcttgtcgtcgctgtcctccgccttgagcagcgcgcccgtcgcgggaatgctgcggccgcggtagcgggcaaggtcggtgatgccggtctcctccgggaagcgcaccgtgtcgagcacgtacttctttttgagcgtcaaaagcgcgacgccctgcgtcgtgcgcgtcgtcttcacaccgagaagcgccgtgttgacgatcagcacgcgcggctctgtcgaatagacggcgatctcgcggtcttctttaaggtgcaaaagcgccttgagcgggctcttgtcgctgtaagcgccggtcaggcggcggcggttcgaggtcgtcttgtaggccgacagctcgaccttcgcggccttaccgttttcgaagaagaagatcatatagccgctgtagtcgcccggcagcaccatgcccatgacgctctcgccctcgtccatgccgagcttggcgggcaggtaatcgcccagctggctcgccttgccgtcggcaaagtcactcgcgcgtgtcttgtagacctgcgccttatcggtgaagaacatcagctcggcggcgttggagctctccacgctcatgctgagcgcgtcgtcctccttgaacttctgctcgccggacatgcgcagcgactgcggcgtgatctttttgaagtacccgtgctgcgacaaaaacagcgtcacgggatagtcctcgatggcgtcctcctcgctctcggcgtcctcggcatagtcgtagaggatgccggtgcggcggggctcggcgtactttttgcgcacatcctcaagctcggtcacgatgatcttgcggatgcgcgacgggcgcgcgagcgtatcctcgaggtcttcgatctccgcctcgagcgatgccgtctcctccacgcgcttcaggatatactcgcggttgatgttgcgcagcttgatctcggcgacatattccgcctggatctggtcgatgccgaagccgatcatcaggttcggcacgacgtcggcctccttttccgtctcgcggatgatcttgatggccttgtcgatgtcgagcaggatctttttaaggccctttaagaggtgcagcttgtcctgccgctttttgagcacgaagtacacgcggcgcttgacgctctcggtgcgccacgcgcaccactcgtctaaaagctcgcgcacgcccatcacgcgcggcatgccgccgatcaggacgttgaagttgcacgacgccgtatcctgcagtgtcgtcgccttgaagagcttctgcatcagcttgtcggggtcggccccgcgctttaggtcgatcgtcagcttgagaccggaaaggtcggtctcgtcacgcatgtcggaaatttccttgaccttgcccgccttgatgagttcggcgaccttgtccatgatggcctcggtcgtggtggtgtaggggatctcataaatttcgatgagattttcttttttgtcgtagcgccagcgggcgcgcacctttatgccgccgcggccggtgttgtaaatgtcctcaatggcgcgcgggtcgtacaggacctcgccgccggtcgggaagtcgggcgcgagcagcgtttcgctgatgcgcacctcaggatttttcaaaaaggcgatcgtcgtgtcgcagacctcgcccaagttaaagccgcacagctggctcgccataccgacagcgatgccctgattggccgagaccagaatattcgggaacgttgttggcagcagcgccggctctttcatcgagttatcgtagttgtcgacaaaatcaacggtgtcagagtcgatgtcgcggaagagttcggcgcagatgggcgcaagcttggcctcggtgtatcggctggccgcccacgccatgtcgcgcgaatagaccttaccgaagttgcccttcgaatcgacgaacgggtgcagcagcgcgccgtagcccttggaaaggcgcaccatcgtgtcatagatcgcggcgtcaccgtgggggttcaatcgcattgtctggcccacgatgttcgcgctcttcgtgcgcgcgccagtgagaagccccatcttatacatcgtgtaaaggagctttcggtgcgagggcttgaagccgtcgatctccggaatggcgcgcgagacaatgacggacatcgcgtagggcatgtagttcgtttcgagcgtctcagtgatattctgctccaccacgtccgcgtggaggcccatgacattcgggtctgcgcggcggtgggtctgctttggtgttttgtcgcttttcttcattcggatacctcaaaattgctccggcggcaatatggccgccggtcatactatttctaatatatcctatcacacttttttttgctctgcaacaccgcggaggaggagaaaattgccgcaaaacgccattttttcgccaaaggcgcacaaaaccgccgcggcagcgcatattgataaaatcgcggcgcagagtgtacaatgcggataccccaacaggtatggaggccaaacgatgcaacagtgtatggacgccgacaatctgcaccgccggctcaaaaagatcatcggccaggtgcaggccatcgaccgcatggtggacgaggacgtcccctgcgaggacatccttgcgcagatcaacgcggccaaatccgcgctgcacggctgcggcaaggtcgtgcttgaggggcacatcaagcactgcgtgcgtgacggcatcgagcacggcgacgcggacaatacgattgagagcttcacgaaggcggtcgagcgtttttcgaacatgggctgaagcagggacgttcccctttcgcgcccgttttcagcagaattacatgaaagaagagaagcagttttgtgctgcttctctctttttgcacgctttataacctatacctccatatgtataatgagcccataccccctatgttacagaaaggagtcacttccgtgaaactggcaacggaaaagctggagcattttttagagctgggcggcacaaaaaaaagatatcacactgctcgtgatctccggcatcgcgctgatcgtcagcatttttgatctcgtccccttgccgttcgacgcctcgtgggccgcgatcatcctctgcggcatccctatcatattagaggccgtcatcggcctcgtcacggcgttcgacatcaaggcagacgtgctcgtctcgctcgcgctgatcgcgtcggtctgcatcggtgaggatttcgccgcgggcgaggtcgcgttcatcatgcagctcggcggtcttcttgaagagctgaccgtcgcccgcgcccacgcgggcatcgaaaagctcgtccatctgacgccgcagaccgcgcgcgtcatcttgggcggaaaggaaaagaccgtccccgccgaggatgtcaaggtcggcgacctgctgcgtgtgctgcccggcgagaccatccccgtcgacggtaagatcgtatcgggccagacgtccgtgaatcaggctgtcatgacgggtgaatcgctgccggtcgacaagggagtcggcgacgaggtgtcctccggcacagtcaaccagttcggtgctttcgagatgaaggccacaaaggtcggcgaggacagctccatccagcgcatgatccgccttgtccagtccgccgacgcgggcaaggccaagatcgtcggccttgccgaccgctgggcgacgtggatcgtcgtcatcgccctgactgccgcggcgctgacgtggctcatctccggtgagatcatccgcgcggtgacgattctggtcgtcttctgcccctgcgcgcttgtgctggcaacgccgactgccatcatggccgccatcggcaacgcgacgaagcacggcttcctcgtccgcgagggcaacgcgctcgagcgcctcgccgccgtgaataagattacctttgacaaaaccggtacgctgacctacggcacgccgagggtcgttctggtgcacagcgcgctgcccttcctctccgatcacgagctctaccgcctctgcgccgcggcggagcactattccgagcacccgctcggcaaggccatcacccgctactgtcaacaggagacgggcgaggcgccgggcgaggccgaagatttccagatggtgccagggcgcggcgtgggcagcgacatcgccgtggacgccgcggatatcgcgctcgtcgacgacgaagtcaaggagctgccgcacctcatcgcgctctccaagcgcatgatgcacaccatcaagctcaacatgacgttctcgatgacgctcaacttcattgccatcgcacttgccatcaccggcatactgaaccctgttgtcggtgcgctggtccataacgcaggcagcgtgcttatcatcacaaactcggccctgctgctaaaatggaggcaaaccgcctcgcagagtttcgcgtccgcagacgcgaaatctgtttgatcgtaaattccgacgacaggcgcgtcggaatttactctttgcgcggagcgtgtgtcgcagccgcgctgcgagcggcaaggcacgaagcgcagcgaatctttttcaaaaagggtggatcgcaaaattgcgatccaccctttttgattttcttttattttctgcgccagacagagggcattaagaggacaagcagcggcatgatctcaagacggccgagcagcatgatggcgctcatcgtgagcttgctgatgccggagaggaagccgaagttgcacgtcggtcccactgcaccaaggcccgggcccacgttgctgatggccgtgagcgaggcggtgaacgccgcggtaaagtcgatgttgtcaagcgacaaaatcagcgtgccgagcagcatgatcgcgatataggcaaagaagaagaccgaaacggacgagacagtctcctccgtcacgcgatgtccgtcgagcgtgataggacgcacctcgcgcgagtgcatcacgcgccgcagatcacgccgcagcgccttgcacaaaagcacgatgcgcgaggccttgacgccgcccgccgtagagcccgcgcagccgccgaaaaacatcaccagcacgaggatacagcggcagaactgcggccagaggtcaaaatcctccgtgcagtagccggtcgttgaaatgagcgttgtgacctgaaaggccgcattctcgatggccgagccgatgtcgcgccccgtgcgcacgatcaggtccgccgcgatcatcgccgacgcgccgaccacgaccagcgagtaaacgcgcagctcctcgctcttgagcgcctcgcggaagcggcgcgtcacgcagaggtagaggagcgtaaagttcacgcttgcggcaaacatgaagaaaatgaggatccagttgacaagatgcgactgataatacgcgatgctcgcatcccggatggaaaagccgccggtagagatcgtcgtcagcgccgtggtgatcgcatcgaacagcgggaggcccgcaatgcgcagcagcagcgcctctgccacggtgagcgcgatgtagatgcggtacaggatgcgcgccgtctcacccgtgcgggggcggagctttgtgctgatggggcctggggattccgctttcatcaggttcacgctgccctcactgagcttgggcagcagcgccagcatcaaaacgaggatacccatgccgcccatccactgcgtgagcgcgcgccagaattggatgccccgcggcagcgacgcaggcgacgggaagatggacgcgccggtcgtcgtcaggccggagacggtctcgaaaatggcgtcgataaagctgcagctgccgctgaaaaagtacggcagcgcgccgaacacgctcagcgcgatccagcacagcgccacgcagacaaagccgtcgcgcggctgaagtcttgtgttgtccgcgcggatgagcgagagcagcacgcccacgccgccgcagatcagcagcgcatacaggaacgcccgctgatccggccctccgccgaacacgctcagcagcagcggcgggatcatacaaagcgcctcgatacagagaatgacgcccacgattctgagaataagattttggttcataatgaaacttccttgccgcaagcagccggcacatcagccgagaatatcgttgaggtcctgcaaaaagagctttttcgccaccacgatcacgcggtcgcccgcatggatctgggaatggccgttcgggatctccatccggccgttgtgcacgatggccgcaacgagcaggccgtttcgaaaatgcaggtcgctgagcggccggtcgagaaagtgcgtggcactcgtcgcggtgaactcgacggcctcgatcgcgccgccgaggatatagtgcaggctttccaccgcgctgccctgcgagttggcaaggccgcggacgtaacttgagatctggcttgcaatgatggccttgggcgaaatgaccgtgtcgaggcccgtgaggttcacgatgtcgagataccccatgcgcgacatcttcggcacgaccttcttcacgccgtagcgcttcgccgtgagcgccataaggaggttttcctcatcgcggtccgtcacggcgatgaacgcgtcgcagtggaaaatgccctcggactcaagcaggtcgtgattcgtgccgtcgccgtggatgacagtgactttcggcagcttttccgcgagcgtgagacatttggcctcgtccttttccacgatcgtcacgtgcgtgccgacatcggtgagcacccaggcaaggtactgtgcgatgcggctgccgccaaggatgctcacgcggcggatgggtgccatggccctgcccatcgagcgcagtacgcgcgttgtctccgcgggcgtgccgatgacgtacacgcggtcgcccgtctgcgggacgaacgagccgttcggcacgatgacctcttccccgcgcttggccgcgcacatgaggatgctgttgggattttcgcggttgtagtcgatgagggacttgccgacaaggctgtcgctctcttcggtctgaaagccgatgagctcgacaagtccgcgggcaaacgtctccacgctgaacgcgctcggcacgcgcagaatgcgcgaaatttcctgcgcggcggcattttcggggttgatgatcatatcaagcccgatctcgcggcgcaggatcggtgcatcgcggaaatactcggggttgcgtacgcgggcgaccgtgtgcttcgcgccgagctttttcgccatcaggcagcagatgaggttgacctcgtcgttttccgaaacggcgatgagaaggtccgcctcgcgcacgcccgcctccaaaaggacgctggcgctcgcgccgttgccctccacacacatgacgtcgagcatggagtcaacgtggtcgagcacggcgctgtcgcggtcgatgacgaccagatcgtggttttcgcccgtcatctgctcggcgatggcgtagccgaccttaccgataccgacaatgatgattttcatttctgcgtttctcctaaattctcttcagcttccgccgtgtgctgcttacgcagcaccatcaaaacactgttgaattccgcccccatgatcagcatgaccgaggcgagatacagccacaaaagcaatacgatcaccgcgccgagcgtgccgtaaatgacggagtagcgcgcgatgttttcaacataatacgaaaaaaggaatgacaatacgagccacatcacgagcgagaacaccgcgcccggccagatgcggttcatccggtgcgactcctgcgcaaggccgtacatcatcgcgatggtgaagaatacaatgccgccgatgataacaaagcgcaggctcgaccacaggtggatgaagccgtcgctcagcgtgatataggccgacaggtggctcgacacgtagttcagcacccgcccgccgacgacggacagtccgatggacaaaacgaccattaaaatcaggctcagcgtataaagcaggagcttgagctgatagcgcaaaaactgcgtgggccggtgctcgccgtaggcccgacggacagagcccagaagtgagcttgccgcgcggtaaggaaagtaaatggaaaaaatcagtgagaaccacaaaagccgtgggcttgaatcgcggctgacataagtgaaatactgctcgatgatctcgagcgcctcctgcgggatgaatgcgcgaatttcatacagaaagccgctgatatccacggacatgatgccgactaagttgctcaaaaagatcaaaagcgggaaaagcgcaaacaaaaggtagtatgtgagcgccgcactgtcgcggccgacatgatgatcgaagtaccgcctgaccatcaggtagatgcctttcaaaaagcggtgccggtcaagatactgctgcaagggcgatgctcacctcctcaaaagtcgatttctctttaatttatgtagtatagcacagcccattacgaaagggaagcgcaaaagcgcaccatgacatactttttacagaaataaagccggaaaaggggttgacacggcgggaaaatgtgcataatatagtaccgttaagttcatacatcgtccggtaggtaaggctaccacaaggatacggactgctgccgcggagtagtggagacactatgagagggtttgaacaggttgcatcgaaagcaaggtgccatctaatgcagtttcaccgcctcgtgatgctaaagcttgaacggtaaggaaatttctcgccaggggcgggtgtttcttgattgtcgctcccatagccgcgtcgccggacgcaggatatgggggatttttttatcgcaaaattcacctgaacactttgatttggcactatcttcagaaaggaggagtcggtatggtcggctttgaagaaatgcgcgacgaactgctggaaagaatcgaggatctgctcaagcgaaaacaatataccgcgctgcgcgacctgcttgcagacctggagcccgcggatatcgcctcgctttttgaagatttggacgaggacagcattccccttttgttccggctccttcccaaagagcccgcggcggaggtgttcgtcgagctcgatcccgacgcgcaggagatgctgatccgcggcttttcgaacaccgagctcaaagaggtccttgacgagctgtatctggacgatgcggtcgacatcgtggaggaaatgcccgcgaacgtcgtcaagcgcatcttaaagcacgcggaccccgacacgcgcaagagcatcaatgaaattctcaaataccccgacgacagcgcgggcgcgctgatgacgacggagtttgtcgacttaaagcgcgatatgaccgtcgaggacgcgctcaagcgtatccgccgcaccggtacggacaaagagaccatcaacgtctgctatgtcgtcgatccggcgcgcaagctgcagggtatcgtctcgctgcgaacgatcctcctctccgatgaggacgacaccatcgacgagatcatggagacgcacgtcatctctgtctccacgctcgaggataaagaggacgttgcgcagaccttctcgaagtacaacttcatcgcccttccggtcgtcgacaaggaagaccgcctcgtcggcatcatcacggtcgacgacgccatcgacgtcatggaagaggagacgaccgaggatatcgaaaagatggcggctatgctgccgacggataagccatacctcaagacgagcgtctgggagacgtacaagtcccgtatcccctggctgctgcttctaatggtctcggccacgttcaccggccagatcatcgcccgctttgaagacgcgctcagcgcgttcgccattctgacggcttatatcccgatgctgatggacacgggcggtaactgcggctcacaggcgagcgtcacggtcatccgtggtatctcgctcgacgagatcgaattttccgacctcttccgcgtcatctggaaggagatccgcgtggcggtcgtctgcggcgccacgcttgccgcagcgaatttcgtcaagctcatgctcgtcgacaagatgatcttcggcaaccccatcaccattacggtcgcgctcgtcatctgcctgacgctcgtggtcacggtgtttgcggccaaggtcgtaggctgcacgctgccgctgctcgccaagaagatcggcttcgaccccgcggtcatggcttcgccgtttatcacgacggtcgtggacgccatctcgctgatgatctacttcaactttgcctcgcttcttctcggaatctgataaaaatacgaaaaactcttttcaatcgcgcatgaactgtgttatgatgcatgttgtatggcatcgtacgataggaaaaggcggctgtgccacgcacagccgcctcttctttttttcaggaggagtttccatggaaaataaactcagagaatacgcaaagctgctcatcgaagtgggtctgaacgttcaaaagggccagaccgtcgtaatccgctgcccggtcgagtgcgcattttttgcgcgcctgtgcgcctccgccgcctacgacgtcggctgccgcgaggtcgtgatgcgctggacggacgactacatgaaccgtgagcgctttctgcgcgcggacaactccgtgttcgacgttttccccgtctggcaggcagaaatgctcaacggctatgctgacgagggcgcagcattcctcaatatctccgcctgtgatcccgaggcgctgcgcggtgtagaccccgaccgcctgacgcgcgcgagccgcagcgaaacggccatccagccctatgtaaacgctgtgatgtctaacggatgcccctggtgcgtcgcctccgtccccattccgagctgggcgaagaaggtcttccccgctcttcccgagcaggaagcgatggacaagctctgggacgcgatcttcacctccgtccgcatcagcggcaagggtaacgccgtcgcgcgctggcatgagcatgtggcgctgctcaaaagccgcatcgcaaagctcaacgatctgcacttcacctcgctctattaccagaactccctcggcacgagcctcaacatcaaacttcccgagacgcacgtctgggccggcggcgacaacaccagccgcgcaggcttcccgttcgtcgccaatatgccgacggaggaggtcttcaccgccccgctcagagacggcattgacggcgtcgtttacgcagccctgccgctcgtgcacaacggcaacatcattgaaaacttccacttcgtcatcaaggacggcaagattgtcgaggcgcacgcggaaaagggcgaggacatcctgaaagccgccatcgccgaggacgagggcgcgtcgtacttcggcgaggtcgcgctcgttccctacgacagtcccatttcgaaccagaagattctcttctacaacacgctcttcgacgaaaacgcggcctgccacctcgccttcggtgaggcgtaccccgagtgcgtcaagggcggcgaggccatgagcaaggaagagctcaaggccgcgggcctgaatgattccaacacgcatgtcgatttcatggtcggcaccgctgacctttccatcatcggcacgacgaaagacgggcgcgagattcccgtgttcgtcaacggcaactttgccctgtaaaaaatgatactgcgggcgcttgcccgctcacaaaggagaaaaaccatgtctatgaattttaaccgcctttccaccgatgacaaaattctcatcatggagggcgcgcaggtactcggcgacgtcgtcgcgggtgaaggcacggcgttctggtacaacagtgtttgccgcggcgagatgcagagcgtgcgcatcggcaagcgctgcaacattcaggacctcgccctgatccacaacaaggtcaccatcggcgacgatgtgtccgtcggccactgcgccaccgtccacggcgcgaccatcggcgaccgcgtgatcgtcggcatgggcgcgacggtgctcgacggcgctgtcatcggcaacgactgcatcatcggcgcgggcgctcttgtcacgggcaagatgaacgcgccggacggctcgatgatcctcggctccccggccaaggtcgtgcgcgagctgacggagaaggaaaaggagagcattctggccaacgccgcgctctatcttgaaaaaagcaaggaataccgcgcccacgccgccaaacaggcgtaaggcaagcacaggaggaatactcatatgaaaatcttagtcatcaacggcgcaaacatgaacatgctcggccgccgcgagccggacatttacggcaaggaagactacgccgccctctgcgcccgcatctatgagcacgcacagagccgcggtgtggccgtggagtgcttccagtccaaccacgagggcgcgatcatcgacgccattcaggaggccgacacggcgttcgacggcatcgtcatcaaccccggcgcttacacgcattacagctacgccatccacgatgcgctcaaggccgtcagcatccccgccgtcgaggtccacatgtccgacatccagaagcgcgaggagttccgccacctgtccgtcaccgcccccgcctgcatcgcccagatccgcggacacgggttcgagagctatactatggcgatcgatatgctggcaaagctcaatcctgaggaaaaataaagttcctgcgatagccggaacacaatattttccgcgcacagcgcggagggatatgccgcctgcgggcggcaagaccacaccccccattttctttcccgagaaagaaaacgggcggtgtgaccgtccaaaagaaaggcgtttgattggcagtctcaggtttgaataagccttttgcctccggaatgggaatgcctgcgcgcggcaaagccgcgtttagcattgctatacgatttgcctctgcttctattatccgctgccgctctgctgatcttgtaggagtgctgactaatttccgtttaccgccagtctcatcaatgcggcgagcgcagcaatgccgcattccgcacgcagtctgccgccagacaaacgtcacacgcgcctcacggtagtaaggcgcggttgagagacgtagcgactcgcagaagattcatggcgaagccatgtacaccgcacccaattgcgcagcgtgtgcagctcttcaagcctcaggccggcaatatcgggggtcgaggggccctcccctcgcgttctcttgggggttcaagggggccattctctcacgtgagagaatggcccccttactgcgcactcccgcacgctgcgggagaaccaaagacgcagccccttcgggctgcccccccttccgcacccgccgggtgcccaaaaccgcgctcgcgcgcttatgttgcaagcgcggaaccacgttccgctttaaaaagcggcaggaacgcgctgcattcccacccctcctcccagcggcgcaggacactttctccgtcatttacctcaaaggtaaaaacgaccgcatcctccgtctgcgcgcttacgcggtaggtaagcgtcaccgccgtcatctgccatggggcggagcgcgccatcgccgcgcggcaggtctttgcggcatctggcagcaatttctgctcgcagcgggcaaaataggcatcagcgagtgcgcggtaatagcggtcgaagcgcttctcgcgccggctctccccttttgtctgcggcagcgtcaagcgggcggtcaggacggtgatgtcctcccaccgccagcttttttcctgggcaaaatcttctcccagcgtcaaacgcggatgctccttcatgcgcttcctccccgttttttcatttggggcagtctatgccgctgcggccaaagcggtgcggcgcgagaaaatgcgggcgcggcactttactaatttcgcactctctgctaaactatatgggatatttgcagaaaggaaggcgacgggcatggacagctacgaagctctcgccgcggcctatgacgagctgaccgaggatgtggaatacgaaaagcgcgcggactttgtcgaaaagctctttctgcgcgcaaagcgccctgtcaggtcactgctcgacctcgcctgcggcacgggcacgatgacggagctcatcgcccgccgcggctacacggtcacgggcgtcgactactcgcccgaaatgctcgcgcaggcgcagcagaagctcgccacgctcgatcccccgccgctgcttttgtgccagtcgatgccgcagctcaagttgttggaaaaagtcgacgccgctatttgctgcctggacagcatcaactatctgacgcgtccgcgcgacgtgcagcgcacgtttgcccgcctgcatgacgccatcgcccccggcgggccgctcgtgttcgacgtgcacgccgtctcaaaaatggaaaaactcgacggcgaggtgctgctcgatgagcgtgaggacgtgttctgcctctggcgcacgcgctaccgaaaaaacgtcaaaatgctcgactacgaggtcgacctcttccgcctccagccggacggcgcgtgggagcgcgactttgaagagcaccaccagcgcgcctacacggtcgaagaattgaccgcgtggctcgaagaggccggtttcacggccatccgcacgcatggcgagctcaagctgcgccgcgcgaacgagcgcgacggccgcatttacttcagttgtatcagaaagtgaggaaccatatatggaagcacagaaggactgtctagtccgcgccatctcgaaagatggctttgtcaacgctgtcgcggtctacacgcgcggtctgaccgagcgcgcccgccagatccaccacacctcccctgtcgccacggcggcgcttggccgcgcgctcgcggcctgttcgatgatgggcaacgcactcaaggataacggcgcaagcgtcacgatgcagatcaagggcgacggcccgcttggcaccatcctgaccgtttcggactctgagggcaatgtgcgcggctacgtgcagaaccccgccgtcgacctcgccctgcgcgaggatggcaagctggacgtcggcaccgccgtcggccacagcggcacgctgacggtcatcaaggacctcaacatgcgtgagccctacgtcggcacggtcgacctgcttggcggcgagattgccgaggacgtggccgcctactatgtcgaatccgagcaggtgccgtcggcctgcggcctgggcgtgctcatcgaccgcgaccgcagcgtgctcaccgcgggcggctatctcatccagctcctccccggcgcgggcgaggacgtcatcaccaaggtcgagggcggcatctacgcagctcccagcgtgacgaatctcttaaaggagaatcctgatcctgcggtgctgctcaaaacggtgctgtctgattttgacatggagatcctctccgtcgatccgatcgaataccgctgctactgctcgcgcgagcgcacggagcgcgcactgctgtcgctggggtcaaaggagcttgaaaagatcgtggacgagcagggctctgctgaactcacctgccagttctgtgacagggtgcagaactttaccaaagaggatctgaccgccatgatcgccgatctgaaaaagcagggaaagtaatgcatttcccttttcaaaaagttttttgaaaaaatcaaaaaataaggttgacacggcaggggttattctgtataataactcttgtcgttcgccgaagcgattatttcgagtggggagcatagctcagctgggagagcatctgccttacaagcagagggtcacaggttcgagccctgttgttcccaccataaattcggccaggtagttcagctggttagaacgccggcctgtcacgccggaggtcgagggttcgaaccccttcctggtcgccattcatcaggctgcaatagcggcttgatatgcctcggtagctcagttggtagagcagcggactgaaaatccgcgtgtcgccagttcgattctggcctgaggcaccatttgcgggcgtagctcatctggtagagcgccaccttgccaaggtggaggtagcgagttcgagcctcgtcgcccgctccacaaatgaaaaaggagcaatgattttgctcctttttccatacggtgacatagccaagtggtaaggcaagggtctgcaaaaccctcattccccagttcaaatctgggtgtcacctccagaagttaggatttcaaacaaaaatgtttggaatcctaactttttatattaaattagtcgcatttttgtgtttttcaaatcccggttttctctgaaaatcgcccgaaatacccgtttaggggaaagggtctgcattttttgctctgttttccctttgatttttcctttacagcaaatcgatcaaggcctgtgctgcttggcacaggccttgtttgttttcttcagaataccgccgtcagcagcatgtaatagccgcaggcgatgagaacggtgagcagaaacagcggcaggagctttttgaccgtggcgaagaatgtgacgccgaaatagtccgagatgatcgccgtgcagatgtgcgtggggctcagctgactcgaggcgaagctgacgctcatcagcagcgccagcaaaaacgcgccgccgttcgggatcatggtgtaggccagcgggataaaggccgcggccgcggcgctcgatcccgcgaccagcgtgccgaacgcgtacaggatcacgagcaccagaaacgccggaatgggcagatgctcgaaatacgtcggcagcacgtcgatcacgccgccaaggatcaaaaggtccttgaagacatacgtcatcgtaataccgagcagtgactttaggtcaaagcccttgatgagcgtatcgcgcacctcctgcgcggagaatttttcgaccagcgcgttgacggctgcgacaacggccacgacggcccacgtcggcagcgaaaacacgataatcaccgcgattgccagcagcagcgaccacaagctccgcaagagcaggcgtacgcactctttcttactgcgtcccgtctcaccgactgtgcgcggcacgcggcgcagatagacaagataaatcgccagaagcgtcagcagcgccatcgggagcatccatacgaaaaacgatgaaatggaaatgccgctgatgctgcacgccacgataacgcccgtgaacgtcggcaccatagcctcgggaatgtggcggaggtacgtggcgaccgccgccttttcatcgttttcgaggtggtcgcccgccatcgtgtccaccatgccgccgcagatcgtcacggtggcggggccctgcatcaggccgatgaacatgcaggcaagcgacgtgttgagcctcgggtcgcgcattagtccattcatcgcccgctgtgcatcctcgaaccgatggcgcaggtcaagctcgtagacaagcaccgagatcacgtacatcgcaaggttcactgaccagacgtcccagcccgtgatcgtgtgcagcgccgtctgccccgccgtggcgagcggcagacggaacatcacgatcttcaggagtgaaccaaaaatcatcgcaagataaaggggcaggcgtttgttaagcagggcgaggatcaccgcaaagatgatcagaactttgataagtgccatggtgctgacttcctctctccatttctcgcgcaaagcaagaaaaaggccgggcggccacttttagggtaccgtccggccaaaatgctattgcgtagtgccttagtgcttctctcaggccttctgctctctcggcagcaggtggatagcgtgcttcgggcagttgggcgcgcagatggtgcagccccagcacttgtccacatcgtagtgcaccttgcggttgtcgtccttgtagaacgcaccgaagttgcaaatcttcgtgcacttgccgcagttgacgcactcgtcctcgtgccagtcgatcttccagttggattcgggatagatcaggcgggagccggccttataggccatctgcatcgggaagcagcacagaccgtcgcagttgcagatgaagccgtcctcgccgttctgcatgagtccgctggcgttgaactcgcgcaccttctttttcatgtcctcagggctgatgggctcgcccatgccgcggtcgaccgcgctgttcggcccgtcgttcatgttgacgcacacattgagcttgcggtcgtggaaatacttctggctcttgcagttgcagggcacaagatggatgctgccgtgatgcccgtcgatgatcttatcgaactcctcgagcgtcagatacgtctggttgtggacatagacgccctcaccggcgaccttggccttcacttgcggcagatagatcgactgataaatctctgtctgccagtcgtagagcgcctcgatgagctctctcggcagacagccgaactcatagtactcaaactgcgcatagtaggaatagcggctgtagaagtcgctgatcttccaggtcggctcgtccgcatccgtgaccttgttgagtacgttgcgggagtacatgcggttgatgagcacgtagggcgacgcggccaggcggttcttctccatgagcttacgcagctccttttccgtcatgggctccttgcccatcagaagaatgacctgccattcctcttcgtgcaccatcaggtcggccacttcgtcgaactgctcgggcactccaaaaagctcgtgcgctttcttgcgatcttcgtcgctcagcttgctggtcagtaaagacatattgctatctcctctttttattgcttgcctgatttcttattatatctgcattgccttttctggggcgctatcctccgccctccacagcaatgatacaacgatgctatgaagcattcttattttatcataatgcttcgccgacgaattatcgttgaatccgcggcgcatcgccgcccgcttcgccatgcgggccgcccaacggattcaacgcttttttcaacggtagcttagtataatcttttcatgccaaacggtcaatcgtttctgcgttatgcacaaaagtggcatgaaccggcaagcggctgtttctttcgcaaaaaagcggcttttcagttcccgcttgccgaaaaaatgtgtaaactctgccgtttttgccacaaagcgcgcaaaaagcggcttgtcattcccccagcgttggcgtatgatgaaaaggtaggctgattccctcgcggaatctgtctttctcgtatttgcttttttactctcccattccgtttcaaggaggttcccgcacagtggacgttttaatcacccaaaagaagatgaccgactccgaggcctttgtcaaggcccgcggcggcggcaacctgattggcaaggccatgtacggcggcggcaagatcacgatgaagcagctctatttgcagagctttgaagtcgtgttcgacgcctatttcaagcccggccttgtggagcgctttttcacccgcaagggccagatgggcggcaactcgcagaagatctgcatgatcgtcgagggcacgcgctgcaccgcgagctaccacgagcagccgctcccgctttacgaagccgacctcgatcccgacatgtgccaggattccaccttcgacaaagaaaagatcatcgcccaggccaagcgcgtcgccatgcgcatcatgcgccgccattcgggccacatcatcacctcgatggaggtcgcgtcctaccgccccttctaccgcccgtactacgtcgcgttctacggcgagatggagatgggcaaaaaggtgcgctacatcgccatcgaggccgacggctacaagaccgacaactccctgtaagagagcgagccccacatttcaagaggtacgatccgatatgaacactgttacgcttggcggcaccgccaccatcaacgaccttgtcagcgtcgcgcgctttggcgcaaaggtcgcgttttccaaagaatatgaagagcgcgtcaaccactgccgcgcccatgtcgaccgcttcagccacgaaggcaaggccatctatggtctgaccacgggccttggcgacaactggaagaagttcatccccgaaaaggaccgcgaaacgatccagcgcaacaacatctacgcccatacctgcgccgtcggcgagcccatcgccgaggagtgcacgcgcgcaatgatgtttgtcatgctctgccacttcggctccggccatacgggcatccgttttgaaacgctcgcgctgatccgcgacatgctcaacgcgggcatcagccccatcgtccccggtcatggctccgtcggctatctgacgctcgagggccacatcggcatggtgatgatcggcgagggcagggccacctatcagggcgaaacgcttgacagcgcagaggcgctcaagcgcgcgggactcaagcccgtcgtgctttcttccaaagaaggccttatcctgctctccggcaccacgtccgtcaccgcgttcgcgtcgcttgcgatctacgatgcacagacgctcagcttgacggcagacattgcgggctctttcacgctcgaggtgctcaagggtacgctgatggctatggacgagcgcctgatggccgtgcgcccgcaccccgaccagatcaacaccgcggccaacatccgcgccattttgaaggacagccccatgcttgagcgctaccgcggccaccgcgtgcaggacgcgctgtccatccgctgcatgccgcagctccacggcccggtcaaaaaggccgtcaaggacgcacagacaacgctcgccatcgagctcaactcgtccgtcgacaacccgctcatcttcgatgaagaggacggcggcgcggtcgcgctgatgggctgcaatgccgacggcacctatgctggtatggcgtccgacaatctctgcatcgcgatcacggatctgtgcaaaatgagcaacagccgcatcgaccgcctgctcaacagcttggtgagcgagctgccggcgttcctcaacaagaacgccgacttcaacaatggccttatgatgatccagtacgcctccgcgggccttcagggcgagctgcgtatcctcgcgcaccccgccgtggtcgacaatctgaccacctgcgccaaccaggaggactatgtcaacatgggctacaacgccgccaagaaggcctatgactcgatgcatctcgccaagtatatcctcgccgccgagctcatctgcgacggtcaggcgctcgactgctacgaggacaagcgctgcgccaagggcacgcaggccatctacgatctgctccgcaccaaagtccccgagatggacaacgacatgcccctcacgccgtatctcgaggccgtcgcccagcagatcatcgaccgcgcgtacatccgcaccgtggaggcaagcgtctgcgcgctgaaattctaaaggagaatgccatgagcgagcacgaacacgtccatgagcacggccacgagcacccccatatgcacgggcatgtccatgaccccgagcagacgaaaaagatcagcaaccgccttgcgcgtgccatcgggcatctcgaatccatcaaaaagatggtggaggacgaccgcgactgctccgaggtgctgatccagctcgccgcggtggagtccgccatccgctcgaccagccgtcagattttgcgcaaccacatggatacctgcgtcaccgccgccatccagcaaaatgacgaggagacgctctccgaactttaccgcgcgatcgacgagcttctaaaatgacaagctgaaaaaacgtccggctgaatatcagccggacgttttttattggaatgttcttccttttgcatagcgggcaaaaatgcgcgcaaactaagcgcggcaaacgccaaaacaactttttcaggaggacaaatccatgaccgatcataccaataacggctgctcctgcacgcccaacacctctattcgctgcgccgtgaccaactgcgccaaccactgtaaggacgcccagtactgcggtctgaacgccatccaggtcggcacgcacgaggccaaccccaccatggaccagtgcaccgactgccagagcttcaagaagcagtaatttttgcagccgccccttaaggcggccgctacatagcatcaaaaaggcggtgacagcatgacggaaaagggcaaataccgcgtctgcggcgcgctcgcaggcacggtgaacggcttattcggcggaggcggcggcatcccgctcgtctttttgctgcgctcgtgggcaaaactctccgacaagacggcactcgcgacctgcgtggctgtcatcttcccgttctgccttgtatcggtgctcgtatacgcgttccgcggcgcgctgccgctcggagaggcgctcccctaccttgtcggcgggcttgcaggcggatggatcggcggcaggctcttcaagaacgtgccgaacacatggctcaagcgcattttcgcgctgtttctgctctatggcgcggtgaggtaccttctgtgacggactggctctttcccgcgctctgcgggcttttgacgggaatcctctcgtcctggggcgtcggcggcgggacactgcttcttttatgcatgacgctctttttcggcgtggagcagcgcacagcgcaggccatcaacctgctctattttctgccaaccgcgggcatctcgctcttcgcgcatcgcaaaaacggatatctcaacaaagccgtcctgcgcgcggccatcccgaccggcacgctctgtgcgctcgccgccgcgtttttgacgacaatggtcgacagcagcgtcttccgcaagccgttcgggctgttcctgctctacgcggggctgtcgatcctctttgaaaagaagaaaaacagcaaaaaagaaacgccgtgactttcgtcatggcgttttcgattctattcagatgcgcagcgctgcttccagcgcgatatagagcttgccgaggtcgtggttcgcgccgcgaagattggcgacatcgtagccgctctcctccagcacgtcgcctgcctcaaggaagttataaagtgccaagccgtaaaaactgcacaccgcctgcacgccggcaagctccatctccacggcgatacagccctcgcttcttcgctgcgcgacgaggcccgcggtctcgcggatcatggcgtccgtcgtccaaacccgccccgtcacgtgcgggacgcccagctcggtaaagatggccgagagcttctgcgcattctcgaccgtgatgtagtcggacggcgcagcgaaatagtacgagcagccctcgccgcggtaactctccgtcgggacgatgaatttgcccctcgtcgcctcccgattcaggctcccgcaggaaccgaacatcacgaacttcgacgcaccgacgatccagctcgcctcatagcactccgacgcggcagccgccgagccgatacccgagaggtaaaacgcgacgtccgttcccttgtaattcatgcggtaaatgggaatgttcccgttgcacgcgccgatgaggccgatcttttcgcagggaaaggcttccagcaaatgctgatagatcttttgcgaaaacaggatcaggcacgtttcgacaaggtgcttctgctcgccataaaagtcccgcaggctgatgacgggttcagtcttatcgtcaaagcagtcggtgatcatcttttcagcgctggtccgtcagtttttcgagcgcgtcttttgcggccatctgctcggcttccttcttgctgcggcccgcgcccttgcccacagcgccgccgttgagcagcacttcaaaatagaacgtcttgtcatggtcggggccgctctcaccaaacaggcggtaggaaagcgtctggttcggcgtgcgctgcacgaattcctgtaaaatggtcttatagtcgcggcgcttttcctcggcgacctcctcgcgctcggtatcgagcaacacgcggtggatgagcgcgctggccgcgctgatgccgccgtcaagatacaccgcggcaaacaccgcctcggtcgcgtcggccaggatagacggacgcgtgcggccgccgcagctctcctcgccgttgccgagctttaagtattttccaagctccaggcgctgcgcgacctcgtgcaggctgtcctcgcacacgagcagcgcgcggatgcgcgtcagctccccctccggcgcggtaggatgcttggcaaacagatactccgccgtcacaaagccgagcacgctgtcacccaggaattccaggcgctcgttgctgaaaaagtttgcgccgcggtgctcgttggcatacgagctgtggcgcagcgcctcttcgagcagcgccggatttttgaaatgatattgcagcttttcttccaaggcctgcatggtgtttcctcctgataaaaggacgccccgcgcaaagcggggcggcttttttcttcttaaccgagcttcgtgctcaggtagcgcacgcagtcgcccaccgtcttgagcgaggtgagctcctcctcggggatctcatcgagctcaaactcttcctccatggccatcaccagttcgacaagatccacggagtcggcgccaagatcttcctcaaaagagctgtccatcgtgacctcatcggggtcgagcgcgaactgctcgacgatcagcttctgcatcgttttgaaaatttcttcggggctcataagtcttatacttcctctcacggttttggttcttccaaatgatacggcaaaggcactgtactgtcaatacccattttgccgctttttggcattcgcgttattctgccttctgttcaatacgcatcttgtcgatattttgcgcgatgtcgtcgatgataccgctgcgcgcgacctccatcgcctgacggaccgcattgcagataccgacctcactcgcgctgccgtgcgccttgacgaccggcttcgagatgccgagcagcgccgtaccgccgacctcgttcgcgtcgagcattttcttgaaatcaccgagctgtcccttgagcagcagcgccgccagcttcgtgccggtgctgtgcatcagcatttccttcaatttgatggaaagaagcttgcccgtgccctcgatgctcttgagcatgatgttgccgctgtagccgtcggcgacgatgacgtcgcactcgccgagcatcgcttccttggcctcaatattgccggtgaagttgagatgccccgcctcgcccgcttccttgagcttctgatacgtttcgcggcgcagcgtgtcgcccttgctctcctccgcgccgatgttcaaaaggccaacgcgcggattttcgacgccgagcaccttctgcgcgtagtagctgccaagatacgcaaattgcagcaggtattcgaccgtgcactcggcgttcgcgccgcagtcgatgagcaccgccttgcccttggccgtcgggatggtcggcgcgagcgccgcgcggcgcagaccgcggatgcgcttgacaacgagcgtcgcgcccgcaaggagcgcgcccgtgctgcccgcgctgacaaagccgtccgcgtcgccggcatggagcatattgagccccacggtgagggacgaatccttcttgtgcttaaaggccgtggccggatcgtcgcagatctcgaccacctcggtcgcgttggcgatctccatgcccttggggagctccttgcagccgcactgctgcagggccttcaagatctcttccgtttttccggtcaggacgatgtccacgccgtacttctcctgcgccatcagcgcgcccttgacgggcgcgagcggggcgaaatcgccgcccatggcgtcgacgatgatcttcacggggtcactctcctttcctgtcacgcagcacgtcctcgcgcatcgcgtcgatcttttcaagcgagcgcgcggcgagctgcgcatttttcacgcgcttgccgcccttgatgcggtagcccagcggcggcatgataccaaagttcacgttcatcggctgaaagtccgagaccgtcgtatcgctgatgtaaagccccagcgccccgatggccgtctcgcgcgggaaatcgacgggcggtttgccttcgagtcttcttgccatctcgatgcccgccagaaagcccgaagccgcggactcgatatagccctccacgccggtcatctgcccggcaaaggcgatgcggtcatccgcgatcaggcgatagtagcggtccagcatccccggcgagcggagataggtgttgcggtgcatcacgccgtagcgcacaaactccgcatcatgcagcgcggggatcatcgaaaacacgcgcttctgctcgggaaagcgcagatgcgtctggaagccgacaaggttatagacgctgccctgcgcgttgtcgcgccgcagctggacgacggcatagggctctttccccgtcttcgggtctcgcagaccgcgcggcttgagggggccgtagcagagcgtatcgtgtccgcggcgcgccatgacctcgacgggcatgcagccctcgaagacgtttttatcctcaaagccgtgtacgctcgcttcctcggcggtcgtgagcgtctgccagaaggcatcgtactcctcctccgtcatcgggcagttgatgtagtccgccgtccccttgtcgtagcgcgaggcgaaaaacgccgaatccatgtcgacgctctcaaacgtcacgagcggcgcggcggcatcgaaaaagttcagcgtgtgcccgtcgccgatcttttcggcgatggcggcggcgagcgcgtcgctcgtcaaggggcctgaggcgatgatgacgttcccctcggggatggccgtcacctcgccggggacaaccgtgatattgggatgtgaacggatcttctctgtcacgagctttgaaaagccgtagcggtcgaccgccagcgcgccgcccgcctccacgcgcgtcgcgtccgcgcaggcaaggatcagcgaatcgaggcggcgcagctcctctttgagaaggccgaccgcgttttcgatctggtccgagcgcagcgaattcgagcagcaaagctcggcaaaatccgccgtgtggtgcgcgggggtggtcttttcgggtttcatttcatgcagcgtcacggcgatgccgcgctgcgcgagctgccaggcagcctcgcagccggcaaggccggcaccgatcacagttacttgcatcagttctcttctttctccgcggtctttttggccgcggacttggtggtcgtcttcttagcggccgcctttttcgtggtcgcagtcttctttgccgccgtcttttttgcgggcttttctgcaccatcctcggctgcggccttctttgtcgttttcttcgctgcggcggtcttcgtcgcggtcttcttggtgctcgccgcttttgtgctcgttttctttgcggtggtgctcttcttagccgtcgtcttcctggcggcggtcttctttgccgcggtctccgccgcatcggcggcttcggcgctctccgcgccctcttccgcggtctcggtggtcttctttttcacatagccgcgctggtcttccggcacaaagcgcgaacacgcggggttgatgcagtacgggcgcttaaagcccttgcccgcctttttgaacatcgtctggccgcactcggggcagtcgtccttcgtcggcacatcccaagtcatgaagtcgcacttcttctcgggatcgctgctggtggagaattcgcaggcgtagtacgtgtactgcttgttcgtcttcttgctcacgccggtgcgcttcatcatgcgcccgccgcacttggggcagcggcccggcatttcgatgacaaggggcttggtgaacgtgcactcagggtagcccgggcaggccaggaagcggccaaagcgcccgctcttgatgaccatgttgcggccgcagacgtcgcacttctcctcgctgacctcatcggggaccttgagtctcacgccctcaagcgccttctcggcgttttcaaggtcgcgctcaaagccgccgtagaagtcgcggatgacgtccttccacgcggtcttgccctcttcgacggtatcgagcttttcctccatgcgggcggtgaacttcatgtccacaatgtcggggaagcgctcttccatcaggcccgtcaccacctcgccgagcggcgtaggacgcaggtattttccgtccttgatgacgtattcgcggtctaagatcgtcgagaccgtcggcgcgtaggtcgacgggcggccgatgccgttctgttccatcgcgcggatgagcgtcgcgtccgtgtagcgcgcgggcggctgagtgaagtgctggagcggcgtatatgcctcgagcgtcaagccctgcccctcgacgagcggcggcagcgtgccctctttttcctccttgctgtcgtcatcgcgggactcctcgtaaacggcggtgtagccggagaatttcaggttgctggcactcgcgtggaactcgtgtccgcccgccatgatctgcgcgctcacgctgtcatacacagcgttcgccatctgggaggccaaaaagcggctccagatcaggcggtacaggcggtactgctcgcccgtcagatcgcccttgatctgctcgggcgtcaggttgacgttcgaggggcggatggcctcgtgcgcgtcctgcgcgccggccttggccttgtagtggcgggcggtctttggatagtagctctgcccgtagcgtcctaaaataaacgtcttcgctgcggcgatggcctcttcggagatgcgcagcgagtcggtacgcatgtaggtgatgagacccaccgtaccctcgcccgtgatgtccacgccctcatagagctgctgggcgatggccatggtgcggcgcggcgtcatgttgagcttgcgcgaggcctcctgctgtaaggtggaagtggtgaacggcagagacggggagcgctgcttgtccgtgcgcttgatattcgtcacggtaaagggcttgtcgccgatgtcggcaatgatgccgtccacctgctcgccggaggtcggctcgacctttttaccgtccttgccgtaatagtgcgcctcaaaggtcttgtgcgtcgcctcgtcggtgaggtcggcgtcaagcgtccagtattcctgcgcctcgaaggcctgaatttccttttcgcggtcgtcgaccatgcgcacagcgacggactgcacgcggcccgcggagaggccgcggcggaccttcttccacagaagcgggctcagctgatagcccacgatgcggtcgagcacgcggcgcgcctgctgcgcgtcgaccaaatcctggtcgatggcgcgcggctccttgatgctctcggagacgacctttttcgtgatctcgttgaaggtcacgcgcttggccttttcatcgtccagattcaaaagcgcttttaagtgccacgagatggcttcgccctcgcggtccgggtccgttgcgagatacacggtgtcgctgtccttggcggccttcttgagctcgccaatgagctcctccttgccgcggatgggctgatagacgggctcgaagtcgtgctcgatatcgacgcccagcttgctcttgggcaggtcgcgcaaatggcccatgctggccttgacctcgtagtctttgccgagatattttccaatggttttcgcctttgccggagactcgacgatcaccagatgcttttttgccatgaatgttattcctccagtagtgtgacggtcaaagaaaaatgcttgccgctgccctgttcgacgtagccctcgagctccatcatcgtgagcgcggaaagaacacggcgcgtggggatctgcgtcttttcgatcaggtcatccacctgcagcgcgccgtctttgagcgtgcgcagaatggcgatctgatcgtcggtcagccccgcgtcgttggttttcaaattcagtgtcggcagcgacagtatttcctccgccgcggcctgcttggcgcgcgcttgctcctcgcgcgcctgatagccgagcatacgtggaagctccacgcgctcgccgagtattttatgcggatagatggcctcgtactcgcgcagcacatcccagctgtcggtgatgaggcccgccgcgccgtccgcgatcaaacggttgcagccgcggcttaatggcgcgtcgatcgggccgggaacggcgaaaacatcgcgtccctgctcaagcgcggtattcgccgtgatgagcgcgccgctcttttccggcgcttcgaccacgatggtcgcgaggctcaggccgctgatgatgcggtttcgcacgggaaaatgccacgcctcggccgccgtcccgggcggatactcgctgatgagcgcgcccgaggccgcgatatcgcggtacagccattcattctccgcaggatagacaatgtccagcccgttgccgagcacggcgatggtctttccgcccgcgcgcagcgcgccgcggtgagatgcgctgtccacgcccgccgccgcgccggagatcacgaccgcgccctgcttgcacagaccgtaggcgatcttctccgccgcttcgatgccgtagggcgaggccttgcgcgtgccgaccatggcgacagcgacctcctcgtcgataacggggagctggcctttgacatagagcaggcacggcggctcaaagatattgcgcaggcgcatcggatagtccgcgtcctgcatcgtgagaagccgcagtcccagccgcgaacacgcgccgaggatacggtcggcgttttccaacgatttttccgcgagcagtgcgatctgccgcggctcgatgccctcgacgaggcggtactcgtcctcgtcggcatagtagacgttctccggcgtgccgaaatagtcgagcagcagaagctttgagcggtttgtcagtcccttgacctccgagagccacacccagtatttaaggcccgccatgaagagcacctccttgtttgtttcagcgatacatctcccacagaacgaccgtcgccgcgatggccgcgttgagcgactcgcagcgcgggctcatgggaattttgagcgtcttggcgcactcatccagcatttgctgcgacagtccgcgcccctcgctgccgatggcgacagcggctttggacaggttcgcgtcagacagcggcacggtgtcctcgcgcagcgccgtaccgtagagcgggacgccgcttttactgagcagcgcgaaaagctcctccggcgtgacgctgtacacctcgcggcggaagatcgcgcccatcgtggcgcgcgccgtcttgggattgaagaggtcggcgcaggcgttgactaagaacacgccgtcgcactcaaacgcgtccgccgtgcgcaggatggtccccacgttcccggggtcctgcacaccgtccagcacgagatagtgcttacccgcaagcgtttcgggcagcttcgtctcgggaagcgcgaccgtaaacagtgcgccctgcggcgtctccatcgggctcaccgagcgcatcatatcttcgctcacgcgcacggcgcgcacggtatcgggaagcgttggaatctccacaccgtcagagaacaccgccgtttggaccggcgcgccccacttgagcgcttcgtccaagagctttgtcccgtcgcagagatattcgccgctctttttgcggtaaggccgggaggaagcgagcttgcgcaggtgcgtcatcagcggattctgccggctcgtgatagtttccacgttcatttttcctcttccctcccagtttcttatttaatatgtatcacactatattatcaactgccgccctttgtcaagcaaaagaatcttttgcaccgtttcacttttgcgcggatcggtgcgctgcggctttacagttcgcccccttttgtggtacactgagcgtgaactatcacgcagcatgactgcaaggaggtaccccaaaatggaatctgccaaatcgcgttttctgcgctatgtgacctattacaccacctcggatgaattcaccggcacctcgccctccacggagcggcagaaggaccttggccgcgtgctgatgcaggagcttgaagcgctgaagctcgaggacgtccacatggacgactgcggcaacgtgctcgcaacgctccccgcgagcgagggcgtggacgcgcccgtcatcgcgctcatcgcgcacatggataccgctcccgacgcttcgggcgaaaacgtcaagccccgcctcgtgcgctacgagggcggcgagctgaagctcaacgacactgtctccctcaccgaggcgctctgccccggccttgaaagccatgtgggcgaagagctcatcgtcaccgacggcacgacgctcctcggcgcggacgacaaggccggcgtcgccgagatcatggccgcggtcgaaacgatgatcgagaaaaacgtcaagcacggcgaggtgcgcgtcatcttcacgaccgacgaggagatcggcaacggcgtggacgggctcgacgtgcaggagctcggctgcgactacggctacaccgtggacggcggcccgctcggtgagatcgaatttgaaaacttcaacgccgcgtccgccgttctgacggtgcacggcgtcggcgtccaccccggcagcgccaaaaatgtgatgatcaacgccgcgaccgcggcgatggccttccacgcgatgctgcccgaggacgaagtcccggagaagaccgacggctacgagggctttttccacctgaccgagatgagcggcagcgtgaccgaggcgacgctgcgctatatcatccgcgaccacgaccgcgagcgctttgaagagaaaaaggcactctttgccgactgcgccgcgcgcctcgacgaaatttacggcgacggcacggccgaggcccagatcagcgacagctactacaacatgaaggagaagatcctcccccacttccacctcatcgagcgcgcggaaaacgccttccgcgccaacggcgtcgagccgcagtgcgtgcccatccgcggcggcacggacggcgcgcgcctgtcctgggacgggcttccctgccccaatctctccaccggcggctacaactatcatggcgtgcgcgagtggatccccgcggacagccttgaggccatgacgaacgtgctcatcacgctgacggagagctttgccgaataaggcaagggctatcgtatcaaagaaatggagtgattttgtgatgaatcctgtcgaaaagctcgcacttttgcgcgcggagatggccaagcgccatatcgatgcctacgtcgtcgtgaccgacgacttccacacctcggaatatgtcggcgcgcacttcaaggcgcgcgaatttctctccggcttcaccggctctgccggtacgctcgtcgtgctgccggacgccgccgcgctgtggacggatggccgctactttctgcaggcctcgcagcagttagaaggcagcggtattgagctcatgcgcatgggccagcccggcgtgcctgagatccccgcgttcctgcgcgaccacgttcctgaaaacggctggatcggcttcgactcgcgcacgatcagcaacaacttcgcccgttcgattggcgagaaaacgcgcgagaagcacatccgctttgcgggcgacgaggaccttgtcgaccttgtgtgggcggaccgccccgcactctcgtgcgagccggtgtgggagctggacgtaaagtatgcaggcctgacgcgcagggaaaagctcgaaatggtgcgcggcaagatgaaggagatgggcgcaagcgtgttcgtcatcccgtccctcgacgaggtcgcgtggctgctgaatctgcgcggcaacgacgtgctcttcacacctgtgttcctctcgtatctgctgcttgagcaggacaaggccacgctctgcgtgcagagagaggccgtgagtgcagagatcgaagcgcatctcaaggccgacggcgtggagctcgcaccctatgacgatatctaccgtttggtcgcggcgctgagcgcgggcacccgcgtcctgctcgacggcgagcgcgccaactaccgcattctgcaaagcgtgccggagagtgccgaagtgctcgaccgcacgagccccattcagctgatgaaggcgatgaaaacgcccgccgagcaggagaacgagcgcctcgcccacatcaaggacggcgtggccgtcacgcgcttcatctactggctcaagcacacgatcggcaaagagccgatcaccgagctcagcgcgtcgaaaaagctcgaatctcttcgtgccgagggtgagcactatcttgagcagagcttcgaccccatcctcgcctacggcgcgcacggcgcgatcgtccactacgagccgaccgaggagaccgacattcccatggagccgcgcggcctctgcctcgccgacacgggcgcgcagtatttggagggcacgaccgacatcacccgcaccatcgcgctggggccgctcacggacgaggaaaagcgcatctacacgcttgtcctgcgcggacacatacagctgggcgcggccaagttcctgcacggctgcatgggcgaaaaccttgacatgctggcccgcacgccgctgtgggaagcgggcctcgacttcaaccacggcacgggtcacggcgtgggcttcgtcctcggcgtgcatgagggccctgagcgcgtacactgggacgtgaagcgccagaagcgccactgcgtcatcgaagagggcatgatcttctcgaacgagccgggcatttaccttgccggcaagttcggcgtgcgcattgagaacctcgtcgttgtacgcgaggctgaggtcaacgagtacggccgcttccttacgctcgaaccgctgacgctcgtgccgtatgaccgcgatgcgatcgatctgtcgctgctctcgtcgcgcgatgtggagcttttgaatgcttatcacgctaaggtctttgcggcgatctcgccgtatctgagcggggatgagctggagtggctcaaggcggccactgagccagtgcagttctgctgaacagcataaaaggcagcgcgatagcgcgcttctatccctgcaccgtgcaggggcgcggaaaaagggggccattctctctcgtgagagaattgcccccttttgatcccccaagagaacgcaaggggcactgccccttgaccccgacattggcagattgcagcttgaagagctgcacgcgctgcgcaatcgggtgcggtgtacatggcttcgccatgaacccctgcgattcggttcatccagcaaccgtgccttactccgtgaggcgcgtgtgacggtagactggcggcagactgcctgcggggcggcatcgctgcgctcgccgcattacaagaaaaacgaccgcgtgagcggtcgtttttatcgtttgtcggtgcggccgaggaggtagtcgacggaggttccgtagaggtcggccagtttaattaaaatttgtgttggcacgtcgttttcgccagtctcgtatttggaatagccggtctgcgacatgcccagcagcttcgcaagtgcagcttgcgtcatatcgttgtcttcccgcaggtctctcaatctcggatacatcatcttcaccccaggaaaactataaagcaagcaacttcttaacttgcattttaatctgtttcaggttattataatcccaaggagggatgaaaatgcctgattatgaaaagatgtatcacctgctattcaacgcgatcaccgacgcactgactcaactggaagcacagaattacggcgatgttaaagccgccctcatcttcgcccaacaaaaagccgaagaaatctatattacagcagaggactaaaaaagaagcaaacttgagcgcggcgaacgcagcaatgccgccttggcaggcatcagcaagatcgtacaaatccaaagtagacagaaattaggctgtacttctacaagatgggcaaaacggcagcggataataggagcaagccaaattgtatcgcagcaaaaaaacagcagacacccgattcctcaggctgagcagctcttcaagcccaaacctcgcaatggcggggtcaaggggcagagccccttgtgttctcttggggggcaaggggggccattctctctcgtgagagaatggcccccttatcccgtgcagcgcctacggcgctgcttccccgtgcctttggcacaaaaaagagctccctctgccgagagaactctttttcgtttttttaatacagctttgcgccggccggaatgtgaggatccaccatcagcaaatgcaacttttcttcgccgttttcgtgatgcacggcggagatcagcataccgcaggaatcaatgcccatcatcgggcggggcggcaggttcgtaatggcgatgcaggtctttccaaccagttcttccggctcataatactcgtgaataccactcaaaatgacccgatctacgccagttccgtcgtccaaaacgaactttaagagctttttggacttcttcacggcttcgcattccttgaccttcacagcccggtaatcggacttggcgaaggtgtcaaaatccacgaaatccttgaacagcggctcgatctcgaccttggagaagtcgatgacctcctccttcttcacttcggcgggagcggcttccgccttgtcggccttcttgggcatgtccaacggcttcattgtcgggaacaattcacggtatgctctatcttgccttatcatgctttattatctcacatttcgcatgaaatccaaaacttttttacccattttgcttttatcttgttttatcttgtgatagtcaaatgtggtaaaatttgtggtaacaccttaaaacctcagataggtttcgtggtttgtgtacaccttatatattatacacaccaataccgcccatgtcaaatagagactattagcaaaaaaagaggggtacatttctgtacccctcttcattcatacaaggaacccaccgtttttctcatggtcttggtatactcgcttaatgttggcaatagccatgaccgctcggttgttcttatatccggggtgtgtttcacagaatctctcatactcgtcgatgtcaaggagcatatcattaaaacactcatgtgtaaagtcctcgcccctcataagctcaatgttgaaccgcagaatacgctggcggtgcatactcgcatctcgctcatcatcgtcctgaatatgtttttcgagcttgtcatgtgtctcacgttgttcctttttgatgtcggcgatctcattcaacacctcaccgttgattgctctgccaatcttctttgacaaccatgaccaaggatttaccttgatcggggcaatctgaacaaaggtcataagcaaaaggagcgtcccgccgctccatcccaagatctctcccatattcatgtcatgtccctccaaagtgcttatcgcgccgtattggaggtaccgttgacaatcttgctcatatcgcacagactgtcaatcagatcggaaatcttgtccatatcgagatcataatttacagtatcggcagaagccttaaccatagccatgacccattccttccgatctgcacccttctcgaacatcgtctcggcgcgttccatgtaactggtaacgagcttaacaacttccggccagtttttgtcctggatcgttttccgcacatacttcaccagctggattgccagcgggatagttgcggcaagaccagacaacaccgatacaatcagtcgtacccattcagaatccatagcactctatcctccttttttatattgcagggctttctttgctgccctctatgccgtcctcacaaaaattgtgtgctttagcagttgcgaatttaattccttctccatcagcaccagagttttctacctcgctcttgtgtacaattttactgagcacaatactgcaggcagttcctatcggggcaaaagctgccgtgtagcaagccagcgccccagtatacccatatacgatactcagtcgagcaaggtaaaagccgccggccaatccagcggcaaggaaaatcatgatacatacagcaagccagttggtaaatccaaggcgtggcctcttcgatttcggcttgcttttcttcttaccacgctcgatcgagatggtcattttacgccttacccatcatctgagtccaacgataaagaacggtgacgaactgctcgcgggtcaaaatatcgccccacatacaattcggctcgcctttgacggtcgcaccattaccggcgatcagaccattcttcgttgcccactcgcgtgcttctgcgctgtatgcgcttgcgtcattgtcctggagttccttacgcatttcgccccagagttctttgaaacgtgttacatccatgtcatcatcctccgtttcgccattgagaatttcctgaacttccttccgcagagcatccatgctcttgccatgcttcggccaccactgccccacgtcgccatggttagagccgtagccggcacgatatgactctgcatgatcgctgatcccagaaatcggatatccgaatttcttgaccatatagacattccatgccacgaccattttccacatccggtcgaaatagccctggtttttcgccacgtcgtatccgaccatcgtgccaccagcataggtgtggcctgcgggttcgcaaatctcccactgcaccttcgtgttattccacgaacccttactgccggaaccgcatccccacgggcgaccattccattgcaaagcgagaataattcgtccttcgcccttatggaagtcaccaaggagagcattaacaccccagcccgcactggacttgttcatcgtgttgaaaaacacatcgacagaaggttgggcgcagccaacagaatggtttacgcagccagcaggcttgatcgttcttccgctggtataagctccgttatccgtcgcagggcggatctccagatggctttcaacgtactggatacattcttgaactgtcatcacttcaaaccacctccacgtattctctgccccagtaaggctcgccgccgtcctccgatgtcttcagcacagcataccaagccttaccgccgtctttacggaaacgcggatcgagtgtcttagagcagaacccgaagccaccctcatcctctgccccgccaccccgacacatttcacgattacattccgtgttttttctgggatcgcactcatagaacaggactttctctcctgtcacgccatccaccaggtacccaccacgggatacaatgttgttgatatcgaccattgaagttcacctctttatttccgaacggtcagatattttcgttactaaccgtagatacttttcatgccggcgaccccatgatttgagcaagacggtagagcaccgtcacgaactgttcacgggtaacaaggtcttgccacatatagttgggttcaccattgatgacagtcccgttgccggtaatcaaacccatatccaacgcccactgccgcgcctcagcgctccactggccgcagtcgttgtcctgcagttcagctctcatttcctgaaagagttttctgaactgttccaaatcagagtcggacgcaggagcagtctgtgaggcaaactggtcatagtaccgctgcccatactcagcacgcttcttctgaacatccttactctggtttgccggcttctcaaagttcagcagcacggcattggaagcctccaatacagaggttgccgcccgcagcaccgccagcacgccggggtagctcccggacagctcttcccaaagaaaatccagctgcataatgagatcgccgatagattttccagacgccttagcaaaatccagcagggcttgcttccgagtccaaaacgtccactgagcaaggccaaagccagccttgtcctgcacgaaatttgtgtaggtaccgttatccacagcagctacataagcattgtcattcatgccaagaacgttttcataactgttctgcaaatttcgaggattaaggccgctttcggcaaacaagttgcccatcaacccagcgatcccatactcactcaatcccttcttttgaaggtagtcatgaattgtcagttcgttcatctcgcacctccttacagatcagaaagcgtggcttgcttctgcccgacgatttcaccgttcatgcaatacttgccgatttcgtcctcatcgtcgatatccttgtagatatccaccatttccaagctctcccatccaatgatggtcttgatcacagaatcgggcaggtttgccttggcaagtgaagtcgtaaagaagtgccggagactatgccaatacacagggatacccagaatattggagaaggtctccgcccagctgttcagcgtagagataggcaccgtcttcgtaggatcgtccctgtcagggaacagccactcactttcgatacccagatctgcccgcttcgccatccacgcatcgaagtagggcttgaaaggctttgccagcacatagcaggtaagcatttttccattgacacccttgcccttcgttctgactttctcaggcgttttgtaaaacgtgccatagatgatgttctcgtcgtcgaagtacgacactttgaaccgcgtcagctcagacttgcgccgtccagaataccgcgccaaagcgaagcagcaggctttctcgtattgcccgcgctccatcagatagtccaagagttgatcggcctgttcgtcggtcagcaccgtcttctctctggtcggctcatttaccgggttctcgatcttgcggacgattgaccggaagttgggaagctcgtcatccaagattgcttcgatgtagttgctcaaagatgacaacgtactcttcagccggcgcacacgggcgggagagttctcgttgttccgcaacagccagttttggtacgagatgatgtcacgcttgctaatctccgggaaatacttgttgtccgcattttggagtacccacacgaagaaaatatacaaatcgctcgtatatgccttaacggtggaatccgccttgccgatactccgcaggtattccagaaaatcgttcatcagccgaatgttcttcgggttgatctgggcgatcaattccgggctggtgatcttgttttgtctcgtcttccgtcccataactctcacctcctttttcgtatgaagaaagagccgcaccttttttaggtacggctcttaaaaatggttagcaaatagctgttttattctgttatgtgtagcggggcttctctccaccctctaccgcatacctcatccagtccagtatgacaatacccacaacggataggacgagccacagcaaagtaaactgcgggcagatttgtcccaggatgttcccggccaagtgcgagtaatcccacactcccaaaccaagccacacattcaaaacaagtccggtaacgaactctaacgctgtaatcgcggcagcacagatacacgcctgccctaccagcggcattccccagggaagctctgctccgaagcgttccagggggacggccagaataatcgccaacgtaaacatcgtccagctgatcgtttctggcctaccctgagaagtcttccagatgacctcgccgaagaaatacacaccgccagtccaaaaccagagcagaacagaaagcacccacttcccaattcgttttcgctccatgcttatcttactcccattctccggcaatttctttcagccggttttgttcccgcagcgcctcttcctctttgacctcagcgccaaactgtgccaacataaaggcttgtgccttaatgatctcagcctgacgaatgcagatgtcggttagttccgcaatcagctcaacgctgctcatgcggcaccgcccagcttttgcatgatagcttccatctgagcctgggctactgccatcttctcagacaaagccgcagcatagggttcgggcagatccataccatactgcacagcagcgatctcctcagcgtcagtcatggcattgacatagctcttgagagcattgtgatatgccgtctgactggtaatcagcgtctgagccgctacgtaaatctgagcgatttccgtagcagaatacaccgtgcaggttccatcatcggcctgataggggtactcagtaccacccagctcaaccacacggaacaggttgttgatattgctctgatcctccagtttcagattgaagtggtcacggcgatccccgataggtacgtctacgccggctacgatgaccgcgttgcaagccttggaaatttccaagagtttcgctgcacgtacagtttccaaggcattgtcactgccgaggatttccaccgcgtcttcggtcgtaatccaaccattcgcaacggccttcaaaaggccacccgctgaaatggagggttcgattccacgcaggccattttcatacatttctctcagtttgtccttcatttctcagccctccaaaatcgtccgaatcagaccctcgatggtagtctgatggcttttgagttcttgcccaccgtcaatctctgagacaacgacagtaccggcaccctcaatgtcttcgtgcccaaccagattgtaggccacactcttgaatgccacaccgatagcatcttcacgggtggccggagtaaaacatccgttatcgccataacgaatgtagttgacagaatcagtaatgcccaattctgtcccgtcaattttgataatccgatacattacttgacctcctttgcaccaatcaacttggcgatatgtttcagatcttcgatttcagcattatagaaatcgtgattccaaagccagaaatcatcacgatcactgcacttgtactgctggcagcggggatcatcccaaatcttatcccatctatcctgatgtgcctcatcatgctttgcaagcgtagacttgatggtttgaatgagttttccacgcagaagcccttgtccatcgtcgttttgcgcaaagaactcatatgcgcaatcactgaacacggcacataccggtttcccgttgtgcagcaaaacatttccacctacttccagcttcgtgccgtatgggatatttacttcgccgctaatagtcttgaactttgctctttttactgtgatatagctattgtggttcaccgtgatatacctccaaataagaaaacacccgaagacttgcttcgagtgtaatctgttagttatttttacgcgggcttctttagttgttcttgctctctataccgactaaacatggcatagtgcagccgtctcaaccgtaacaacctgccgtgatcgtcaaaattcctgtagtacgcagtctggcattccatatattgatctatctcgaaaagtgttttcctaccggcaagatattccctatggaacattttcaacttacgccttgcacgcttcacaccatcacggctaccgttgattttgattgctccggtttccgtcaatgtgaaacgagccttacaaaacctaaacggctttgtaagcggaatgattttgcactttttcttattcaccctaataccgaaagactcaaactttttaacaatatctcttgctatctgtttcagttcttcaatatcatggtaaataacatagtagtcatccatgtagtgaccggcgcagtgaagaccaagctggcatttgatatagttgtcaatcgcacttggaagagacaccatctcctgctggctcggctccacgcccaaaggcatacctctaccaggcgcattgccataaggcgcatagtcaataatcgcgtctgctactgcccgaatctgcgggtcaaacattacttgctgatgccgacgatagatgatgtctctgttagcattcggaaagaagctcttcaagtcaagaaggaatatgcccccttctcttccatagcgtcggtaatgccatgcaagctgttgtgttaccctacggaaatgccaatgtagtcccttacctctctgacttgctccgttgtcgcaaatcatacccggatgataaaggggaatgaggacttcatttgtaaaaaccttatgaatctgccgatcgtcgatgtgcggggcatcaatcggtcgcacttttccacgctcagaaatggtgaaatgtgcgcacttcttttgtttccacttaccgtccaaaacttcacgccgtctcttggctgttccagaaaataagtgaagctcaaagttttgcgtactctgtttccaacggacacccgtacaacattttcttccatagaagaacatatcgtgatagttgaaaacatcttgaagtgtaccgacttctttgcttcgttttagtctgtttgcttgtcgctttgattttctgcgatgatatcttgcctctcggcgttcttcgcttgtcataaaaagtgttcgccctccgcatagttgtcttgtaggtgcgcatctaaactactttgacccgacacatgaaacgaggatagcgcaagtaccccgccatgcaagcagcgtccgtgtaaggtcgtcaaagggcagttttagggattttcacccagggaagtatctctccttttgcgagggtcgtctttcacctatcggttactccatgtgaccccgcatcgcaaaatccgggcgcgagcgcagccgcattccttgcattgttattgttggcgctgccatcagtgttcacattgcagaaattgttattgttgttgtaattagcagagcggagccaccaccacgccgccaaaggcggcgaaaacaccaaggacacgttttcagaaatacacccaataaagatttagctctttttgatttgccctaacgatttcagagtccctttgatcaactcatcttcgttatcaatcatttccccaagacttgcagccattctgtctaacttttccgttgcctccttcggagatactgaatttcccttagaagttgtaaaacatccctcgggattcttcattatcacgagatagcaatgcgtaagtctgacatccagtgcttttaaggaagctcttgcttccagtaaatgcgctttgcgtaactcaattctctgagcgtctgatgggaaaatactgttcgctttctcagcatgatccactacttctccagccaacttagccacaggttcggccaaaagtctggaataccgtgcagacatccttgtgagaaaattcagcgtttctacatagatttggttagcagtattgacatactcagccttactcgtagtccgccttgctttcaatacagacattcttttacctctctggtgaatggtcttttgccctattcatctaacttagtttgattagcagtaatcgctccctccgctttttcgacttcttccagatgtttcaaaagcacaaactctatgtagtttgtcatggaacgatgctgttttgtcgccagcgcaccaatcttatcaaacacctcatcagatagacgcagcgtgaaaacacgtttgtttgatgccatactcaacctcccacttacctgcacataaatattttagtgctattttcagcttttgtatgcagtatttagactgttaagtgatagcattttatagggcatttttctaaaaatcgcgtcggcggcgcaaagcgccgcctccgcttttgtttttttgtctccgtatctgttaccttatctgtcctatcggggaacccgcccattttcatgggcgggatatggattgggatactctgcggaggattagacagcaaagccgggcgcgagcgcagccgcataccttgcaatgttatagttggcgctgccatcagtgttcacatagcagaaagagttactgttgttgtaataagcagagcggagccaccaccacgccgtagagccgatagcgttgtgtctatacatgaccctgctgttaccggaagagtaataggcgtactgcttctggtagttctgctcatactggttagcataataacgagtaccctgtacctcgaactcagccagcaggaacagatagtcggtgaatgccttgacattcgcaaccacattggagctgttgccaacggcatcagcgtatttggtaacgcccttcataaccgctctcaggtcagcaggaagcgcagccatcagcgtattcgcaacagggcttgtagcacaagtggcacttgcattataaccaactctggatgtagttacagcagaaccgtagccagaaggagccacatcggtactacccaaaacatcgtaacgcaggtcacaaccagcccagccaccatagttatagttgccccaatggttcatattgaaatactttgtaccattggtataatagctattgtagccactgtcgatcaggccaatcaacctactactgatcttaccaatctggaagtgaatcctgttgctgccctcgacagagctgttgtggtcaaagcccaaaataaaaacatcaacagacaggttggaaagagaaagcgttccaactgtaccgttgatggtaatggtctttgttgcgccgactgaccagtatgtgcttgccaaaccagctgcagcgatcttgctgatatcttcccaagagcagtcgttcaatgcagttccgacagcaggaaggaactccgcagacaccgcgaccgtcttactgccaggggcagtatggtttgcaccagcggctacactgatagtgattttcgccgtaccagtcttatcgttcacgctttggatagtcaccacgttcccgctgacagaagccgtagcaacactggcgtcactggtttgtgcggaaattgcgccgtcgccggcacgggtaacgatgactgttttgctttttgctgaactattcagaactacgctcgtcgcgctcaggctcaaagagcctgccgctttaccgatagtccagcttaccgtcttagcagatgtgctaccgtcagaccagcaataatcgtctttgggagtaaaggtggcgttatagcttccagcgttaatgccgcttgtaactccacccaatgtcattttggagctatcatagttgctccatgacgggctttgagaattgcccgaatatgtcaggctaccactctgactgggaaccgtagagatcgcaagccgattaggtacgccagtgacacgattggcagtgcccgtgtttaccgctccatctgtagaagtcgggaagaacgacacataataggtcactccgttttgcaggccggtaacagtcaacgggctactggcatactgattgcgggtcgttaccgccagccgatacgccgcatctgcgtcgtcgggatcagtagcataaccgcccgccttaactaccacagtagtcttcgcccaagtcgccagcgttacaccgtcgttcatcacggtagccgaaggatcagtccatttcagtgccagcttgccgttaccagcggcaacagcactcatgctggacacatcgccaactgccacaggagcgggcgtcttgctgaactcgtcgtccgcactatccgtataggaactctgcgtagtgtagggaaagaacttgtagtagtaggttacaccgtctgtcaggccagaatcgcaaaagtattcgttctgatacgcattgcgagtcttgctatccaaaactaccgtaccatcacgacggcttacaggggcactacctgccttacgcaccagcagagtgccgccccatgctgccagtgtggagccggccacaaccagatcgtcagggtcagtccacttcacataaaccttgccggcagcggccaaggtctgaatatctgtcacagcggccagggtcagaccgcctgttccgcctccaccaccagaggggaaattgccaagaataggcatattgaatcctccttttcttttatcccaggagagtgattaccacagggatatcaatatcgggcatttcaccgtctgctgagataatgagctttccatcagactgcccggttacgcagagtttggcatctcgtgccatctcacgttgctcaaaagttgcgctatgagcgaccgagatattaccgttttgcgcagcaccaagattagtgacggccagttcttgcgtaaacggagcatctacccctacccatgagctggcgatcagcgtacattcaatactcacgctcttgccgcctttctccgccaaaatctcatcaaccttaatgaagttggaattagatgcaccgttgattgcttcacgccagtccttaaattttgtcgaagaatcgtcttccaggataagcccatagttcgtcgttgtttggctcacagctcatccctccttaaccgaacagaataaccgtgatcgggatatcacacgtaggtttgtctccaccaatggcgacagtaaaggaaccgtcctgctgcccacaaacataaaggctggcggtttctgccgcctctctttcctccatggacacactctgagacaagcccacgatgccgttttgatctgccgtcagtccagaaatctcaatattttgtttattgtctgaccaagacgcaacagacagcaccttgtcaaccgacatacttccaccaccggaacatttgacccatgagctgttgttatatctccaaagagcgccagatcccttcacgaagtagaacttctcgaacggtgaggtcagcgcaagacgttgtgactctgtgtccaggacgatgatatccgtcaactgaacacgtgttccgtcagaatcgtaaaagatgtcacctgaatcagttacgataaggaattgcttgtccttgatcggaaccgtagatgtattccgcgctttactggcaaccgtctggtttacgttgaatagggacaatttgtacacctcctttaattgaaaaaggaggggcggcatctaagccactccctcctcggtcagtttaccggattccctgatcagaacgtaccgacagtcagagctgcaacaacagcgtccagattagccttgtcgccctcagcgatcttgtccagctcggtcttgttggcgtgctcgtgagcctttgcagccgcagcatcccacttagccttgtcgccctcagcgatcttatccagctcggtcttgttggtgtggctgtgcttcttggcaacagcgtccttcagatcctcgttggtctgatcgtaggtgtcgagcagagccttgttagcgtgggtgtgggtatccttctccagagcagcgatgcggccaatagcagcagtcaggtcagcagccttggcatagtcaccgatgttcagagcggcgatagcgccgtcagtatactccttgatgtaggcaaccacggtgtcgctgacagctcccttgggcagagtgccaaccaggttcttcagggcggtgatagcctgattcatcgcagaggcgtcatcggggtgagactgaatccaagcggcgatctcggccagagtattcagagactccttggcgctctcggggatcagctgggcagccagctcctcattggcaatggtacgggcagacttaccggcatcagcaccaatcagagtggtcagcttgccattggcggcgtccagatcggtctgttcagccttgccgttgatcttggccttcagggtagcctccagctcggtctcgctcacctcgtccttctttgccagagcgcccagaccatcaacaatgccggtaacctctgcgaccttcgcatcggtgtagtccttcacagccttgcttgtaggcacagtgctgtcatcagcgttctcgccgataacggtagcataacccttgatcacaacaacccaagcggagccattgtagacctcgccaacaccggtatcggtattgacatagatcacgccctcggcaggagtggcaggcttaccctcagcgctggtatagagacggacgccctcaccgtacttcttgtcaccgaaatacagctcacgggtgtcgtcagtcaagtagaagctaccagcatcacgaacggcaggcaggttggccttgttaccatggtacacgagtttgtagtttgcagtcatagcatttcatcctttcttctcacgtattgtggattgatatatttgtaaagaaaacatctctgcatccagattgttgcccgtttgcatgaaattgattttctttgcagcttttgcgactggcacgaaatcagaatactcctaccatattgcgtactacttcctcagtagtagcaatagatccttctgtaatatcagcagcagtaccgccaacggggacgccataggttttaatctgaccagcactgatccatgtcagtttgctttccgcgccattgttcattacatagaacaggtcatcagccaatgtttcacgctcaatatcatcgggtgtaagtttccacgtaccttcgatattgtaaacaccggtctccaaagcactgattacagttccggttcctgcaatgtttgttacagggcggtttttcaactggtcatagtcagaaacaccgccagaagaaccgccgcctccgccctgattagtcaaggcagaaatccagctcaaatcagccataattgtgcctcctctcagaacatatagtaaatattgacattaaccgcctcagaaaattccagagacgtaatgttaatctgatccatgcccagctcaaaaataccagtgatcagtgggatctccttcccgttgattttcactttcgttccttctgggcaaatcatactgagcttccgcagcgacatttgaccgaagttcaaaatgctattgggattatccgcacgctcattctgtttgaagatatccagcatattgacattcggcgtcacagtcccgctaaaacaacccaaatgtgcctgtgacatttttcttactcctttcctaagcaagtacaacaaagtccaactcttccagagtcatatcgtcgatctctgccaaggttttatcgtccagatctgacaacaggcggtagcgcttcatgcccgcattcagtgtcattaggatctctgcatcatttgacacagcaaacaagctgatcgtctcgacaaccagttcgtagaacatttcgatagcattaccaatttgcagtttcttttctgcaatggtttctggttcggaagtctcaataccgattgcattgctaccgccccccagagaatagtggaactctgtttctccaatgcttgccgcaatcgcaaatgcggcctccattcctgttgtatagcgataaagcagctccgggcttgtctggtcaataccgatcgcactactgcctgactcaaaatcgtgtttccgaaatgcaagatcatttgcaccaaaaacagtctgattttgaatagtgtcaaagacttgcttttgttccgcaagactttttgctacaatcgccattgcactctgcgcatcgccaagggaactcttagcataagcaatcggctggctaactttgataccgatttgactttccaaggcaaagaaactctgggcaaacagcgtgaaagctgggatatccagcctcatcgctgcctgctccagttcgtttcgatacttgatagtaagtgcggcgctcgcttccagacaaacttgatcaccgattttctcactgaccgtagccagcatctcgtcgatctccgacaacagagcagattgatttgccactgcaattttcttttgcaggctgaaatatgacagcatcgcccgcaaaactactctgtttacagctgatacgccatcacgaaatgggagggagtaaacgatgattgaaccttcagtcaaacgctgtttcaggaaaatatcgtactccttcatctcctatcgctccttatgccgtcgggttcaccacagacaggttcagagaacccagcttgatggtcatgatggttgcagcctcaacacgacgacttacagacagctcaccgtacatcagcaggttgccaccagtcagagcatcgtaaacaacaaagtgggtcatagtgccccactcggaagtgctctccgcaaaatcaatcgcagcattgttggtcacgacaccattaacaggggcgctcaaagaagtcagctctacacgagcatagccggcgccctcaccaggctcaacaacgccactgccatccagagcaggcgcggcgctactcagacccagataatatttctcaggcaaagccggggttttcttggagccaaacacgttgcctgacaccaaattcagaaaataggtcgtattcatcgtcctcatcctttctcaatgattttctttgttgcttaatgggggaaacttttgttgatattgttcgcaatgcgaataataccctgatccgggatctcaatttcccctgagatatcctgaatagtaatctgatagataaacttaccgaccagatctaccgtttcctctggcagcaacaccacacgcagaacatttgttacagttccgtcgccgtcctcactcttactaacctccatcggtttggcaataagcggtgatccgtttttgttgacaaaattgatcaacgcaaaactggccgtacaggaggatagatcaaacggctttttgttttgtgaaaagaacgtgtggaacacaagttcctgcgttgatcctcccacaaagtcgatggtaggaagtgagtaagggctgtaatcacaattcatacctatcaccgccctttcaaatattatttttcagcggattttgaagtagcttcaacaatttccgcattgttcaaaacgtcggcaacctcttcgagaatggcgatactaccactcagatttgccaaattcgccttgccttttacatagacattgttcagcgcattcagcacgaatcccagttgctgcataacttgatccttcatatagtcctccttacaaagacttgattttttcttccagttcggagatgcgacggtaaagcgtttgaatcatgtaggtattcaaagagataaactccccataccgcagacgatagaaaacgtcatcaataccgtctttgggattgacttcttggacaggagtaattgtcaggccggcaaagtcattcgtcgtcaaaccactttccaacaatgcacgctcaacgtcctgcgcgataaatccagtatgaagtctcttagactttccagcttttagctgatactgagcaggtttcagcttcataaagaaattctcgtacttgtccattctgtactcgatcgcttgcttcaatctcctatcagatccgaccgagatctcttcatcagcaaacaaaccattgtttgtaatggtaaaaccatgatccggtgcctgcatacgcacacctttgttggtcgcaataaagtagtattcatcatcacttccgtacattttagcgccgtaagtaaaactcacgccgtcgctgcccctcgcgcaacagaatccaccataatcactgccaagagtgatcaaatcggcgtcaatctgacctgcacgaatatagtttgcattgatatacagcttgcgcgtcgaagaatcactaaaaacgccaaactttgtaccgccatttgtcaaaacattaaaaacgtttcgctcattgacggtcgcatcgcttccgtccataccatcctggccgtctttaccattctggccgtcttcaccgcgaatcttaatcgccgaagtccaggtcactccgccatcgtaggtataagaagcatagagatctccgtcattgatagacttgtgccaactggtacttcccctggacggatacgagttgtatgacccggtaggaggtgaggcggcaatactgcaatacaacaccaagcacgggctgttgccgctgccccaagtaatgctgccgtccgccatattgatgctgcccttcatagtgacattgccggacggatcgacatagaacgcaccgttgtttacatcaataccgcagcctttcagccatccaccagattgtggatcggctgtcagatttccgctcagtcttgaggcagagagcgtaccgctaaactcgccatctcttgcgtgcagtgtgccgtctcgctttacccagaattttgcattctcaggttttgtagcacccgcccaaatcgcatacagcgaattggtatccttggaagagttgagggcaacaaaagtagagtttgatccacaatgaagctcattctcggccagttcccacccgccaatcgaaccggagtcggccttgattcttcctctgaaataagcgctgccgtctcgaagatccagatagaagtttgcgttctcaggcataccgtccgcatcgaacttgatatcgccccaatcgtcaataaactccggggtcacggttgtaccgttagtattgaacaggagcttattgccggccacgataccatacttcggatcgaagatcatcaggccaccgtcgtcatgctgcataatgtacgaggcgttatacaaccaagctccggtggcgtccaccttgaattgcattacgccgttatcgttggcgttctccaagacgaggttgttaccaataatgagactacccgcaagcagttctgtattgataccccatgtctctccaatcaggatatcgttacccttatcatctttgagacctgttttcgcatcggagtaaaaccgaccgatacccagtttagcagtcttccaaccatcgtcagtcatggcaatcatgttgtccacgatacgcagttgatacttactgtcaccgcctacttggatacccgcaccattgatcacaacgctctgattacttgcgccaataatggtgtttactgccgcattcaaggcgttctccataaactgcgaaacctgagtagtcttattcgcagttctgttgtagaggtatttgctggtatcaaaactgcggctggacgcactgaccttattgacctcactcagccaattcgcaactacgtcacgtttttggaaacgattagaaaaggtcaatgtcaacttctcggggttctcaaagtccagagctaccccgatcagcttcggctcgatcacaccaccatcaccgacgttcagataaatgctcttgccgaactccaatttattcttaaacggctcaaattctttctggaacaagaaattagccgtatcaatggaaaactcgtaaacaggccatacccattcatccaaaagctcttcgccaaatgcgtacagctcttgcgccacagaatatttttgatactcgttcacatttactgtgaaaaacagcttggatgtgcccgcctcaaaagaaatctgggtgcctttgttctccgttaccccatcctgagaaacaggagaaatatcactgctgaactgagaaagtatgccggatgcagtaacaagtccgctcgggaagctatgctcatcaaacgtcgtagatcccatgtacaccgtcagtacatattcgtttgtacttgggttaacctccaaagtaccacgcacaatgtctgccgtcagctttgcgctggcaattttcaaaacgccgcccgcaatagcatacatacttttaccgttaagacttgcctgtgcaatatcagccccggtcaatgtaacctccccctgcaatgtggagatggcaccagaagccgatgtatctacatcggtcgcaacgaaagtttcttctgccgcttcgccctcaatcaaatagtggttgaggattttttgttcggcttttgtgaaatacttggaaatagacagctgctctacaacaccctgaatatcagtggtataccgatcaatctctgcctgcaaattcgcaatcactgtttcttgcgcctcaatctcagagttctttgcagagattttctcattgatctctgtcagctgttgctgttgacttgtctttccagcggcagtggattccagagccattgcctggataattacactttgttgcgtagtcaggacttccaaatcgcctttcagcgaagcgagtgtcgcttcctccgccagcctttgggcggttctggatgcccgtgctgctaccagattggtgtagtaagtttggttgcttttaattgcagcattccagctcttgacacgctcggccaaagtaactgtgctgccctcggcgatcacatcaaaatcgccgttggaaatgaagtatgacaggtttaccatgtagtctgtgccgatcgggtttacatcccgaatactcaggtcgtccgatccgtacagatggagctttgtcaccatatcatcggtaagctcttccagatcaaccgcgtccaccaaattctgataactcagatagataggtacggttccacggcttttgcccgcgtcgtaagcactaattgtcctggcgtacacgtcaaacacaatcgtgcagttatacttctccatagcactgccatagcaaaaactcaaggcgtcgctatcgtactcgtcaaaggtgcgataacatccaatcagcttggggtcaacatacccaatactccatgtcgtatccaattccagaatacggcccagaatagtatcctccggctgaacaggattccagaagttatacgttccttcttccaaatagagtttctttttctcaaaaagctgctcaatagagtatccggtaatatgctttacctcagatacaccgtcacctgatgtagccggcctctgaagaatgtagataccaagctgttcggtaaacagcattttgtagctggtcagcaaatgataaaccggattgattttcccatcggaatgccgaggaacatcgaactcaacgcggcttacatccgcatagttcaattcaaaattaaggttgctgacccaagggataaccccaagctctttaccggccagagtctgcaaccgtaaagcgggctgcttaatctggctggcttccaatttagaataatccagatacacctctggcctcctttcttatgctccgacgttataaaggtatcgaccgctgatcgttacgctcccagttccagtgaataccaattcattgtctccgggttccaactccaaaaacgcaaaattgaagtgttcataaagatcgtagccagaaacttcctcggtaactacctggttctcattgtcaacgcggatagacaaactgcttcccggcaaattatcaaaccgcatttctgctccggtcgtcttgttctttactgcaaaactggtacagccggcagcaagagtgaccaacatttctgggcgtaacttttccatgcaggtactgtcgttgtaaaaccgcaccgctgttcccccgctgatttgataggtcttcgcaaatggataactatatccatatgggcagtcgcagatgattttagcttcaaacgccataggcacccagctgagatgaataggcgtcagttcctgaacgagacaccggaattgaatatgctccatatccggctgatcaatactgagccattggtactcctgataccctgtcagccattttgaaaccgcctgcatttcatagcgatccaacttatgatctgctccgaaaatcaacgtaaagctcaacggactatcgttatatcgcacaccatagtggatcggcgcaacacgatttgccagccgcgtctccaccagatttgctttattgccaaaactattggcactatgtttattgctggacatatccgcaatgtacataccaaacatggaagcgggcataccagcataggtaaattcatagcttttgaacattgtcttcccttccttgctatatgaaagggacgcccaatttcgggcgtcccaatcttatctcccgattccaatgagccgtccaatctgattgaccatatcgcgtgtaaccttgatatgcttatcaaccgtagattggtcggcaccatgaatgatcgtatcgccaatctgcacttcaatgggtctgctgttgttggtgatattatttaccgtcttactgccgcctacctgcttcatcacatcagacaaagtagacttgccagcataatccggcagatcactcattgcgtcagagagcatattgatacgatccatctgtgtggtcagattgtccaccatctgttcgctcaatacccactccttggttttcagcagagagagttgttcgttggacttgatatctcctccgccgacaatgccaccctcatgataggtgtactttctgtacttatcgtacagcagttgcccacccacgcgatctacgtaccaaacaccatcactgccgcgcaccgcagtaataccatactgtgccagctgtgcgccaagctcaagattgcgccggttcagatagagcttgccggcagcatcttcataagcgtgctgcttgctgtttgcatacatttctttgatgatcgcatggatcatatcttcgccgctggagctattgtcataggtagcattcccaacttggaaatttgttccgctggactgcgtggccttgatgtctcctccgatacttcccagagcagacacgtaacttccataccgttgtgcagcagccaagcagttatcccaagcattcgcaatatcactgttcagcacatcaccatactgcgtgttccaactgatcagctcgctatacagcgtatcccagtgagactcgatataagagattgccatatcatagagcttctgatgagaagagatactgtcttccagaatcccaatttccttatccttctcgtcatgataggactcttccatcttatccagagcgtcctcctgagcctccagtgttctgtccgcctgttcgtcggccaaatcagactgaagctcactcagttctttgagcaacgcagctttttcagcctgagcttcgcggctgtcatccagagaaagcatatcaatacgagcttgcagcttcgcaatctcacgcattttagatgccatggtcttctggtgatctgcctcgtctttgctggcctccaatgactgcttcttcaggtcgataatttcagagtacgcatccttcatgtcctccaatccgtcgatctgatcttggatacgctgtttcagcatatccattacataatcgaggatgtcgttcaatccgttctgcatctcctctaactcgtccgtcacgccacccacggttttaccaatgctctgtacggcgctgtccgccatagtccgaattgcattgatattccgcaacgccgcttggtactgatcttcgtccagtccagccaaagccagatttgcatagaccaatccccaagttgcgttagtagcctgttcggttgcatacagcaaattattcagagttgcgatatcgccctcagactttgccatacgaagcgcttctacataggccaaagaactctcaatcgccatctgctgcgtccgtgcggcaataaccgcttggatgcgctcttcgttgatgacaagctgcccattctcatcaatcaggtacgctacgtacttctgcccaagcccgataatactctgcaaagtatctacggtaatgaacccgctctgggcatactcgtccgccgcgtcatggagtgtgtcataaacattttggatagtatcaaccgcgtcggaagcctcttcaacgataccatccagaagctccataatctgcttacgggcttccttgatatcctgtccaagttctttccaactttccgaaccgtcacgattttcctcgttcaagtccgtcagagaattgataagatcctcagtttccttcctcaaaccatttgtggcctcctgcagagtgtcgtatccacccttactatcggccaccagctcattcaggtgctccatgtttgcgatccaaagttcattggtatcggcgttatactgtacctcgaaccccagatctcgcagcgccttaacgccggaagagatcgtgctttccctttggtcatttagattttgcagcgcctcttgctcacgctgataggcaccgatcagctgacgctccaaaaggattttctctctcaaatcgtcagagttatcaattttggtttcaagctccgctctggcctcttgtgtcttgcgcagccgttcaaccgcctctcgatagtcgtcaatggtagcgacatactcttcgacatctttcttagagctgctacccgacttcgtatcgctcttgaaactcttcaaaggcgcatttttcaacgcctgcaaagccgcgatttgtccatcaatctggctgatcgtgtcttggtacttggaaacatccagttcaatctgggaaataaagtcctccagattgctttccttagcggtgtaggaatattctgtccccttaaagctaccgcttgtcaggttgagcttaatgccactaccgccagtaccaccaccagacccaccttgtacgtcagccgatccagctactgtaccgcttgcaacaccagcaatagccttagctgtctggtgtgcctgctttgcgacagaagcaagatccgtctttacgctggtcaggttgttgtacatcgtctgcgccagatcataggcagcttgattaaagttgccatttacatccgtgcagacctcagccgctacccggttgaactcttccgcattttgagccatagcagccgccgccagcttaaacgcagtcgcctcatcaacgccagcatcaatcagagcctgagcaacagcgttaccggcattgatccgatactccgccagctcttttgagatatctccctcaccctcagcaaccgctttggcaaggtcaagctgcgtctgagctgcttccatcttggcctgcaagactgccttttcagcttccagctgggcaatttgcccatcaatctgagcatccaattcagcccttttgccttgaatgaaagagtttactacaccctcattaaggataatctgaccatcagccgctacttgggcattattcatgatctcaggatagaccttggcgaactccaaagccttatccaatgacatggtaaacccgttggctaccccagcctgcaaatctgcaagcgtccggaaagaatcagagatagtatcaatggtagttgcaacattcgagaagttttgcaaggcagaagtatatgcgtccagatcaccggtgattgaaccgtacaaactgctgtagatcgccaacttgccctggttttcagcaatcgcctcgttgtttttcttgatttcctctgtggcgttgccgatcatgcccgaccacagaccaccatcattgccaaggttacgctgctcctcgtaatacttaatgctctcttgcagggtggcgttacgctcttgaagcgagtcgatctccttttggatctcgtccatctcgccctgcattttagcattagcgttttctttccatgccgctgtgttgagctttacgacgccgttctcctcgtagaggtagtccagatatttttcctcagcaccggcaagagactcaattgtttcagcagacaatccgccgccaccggccatatcactttcggcagacgccaaagcatcatacgaagactgcaaccccgaaataacatcggtcagtttttccagctgtgcgatatatacagaagtgccaccgttgtttgtggcctgttgcattgctccgctgaactccgggaaggtatcgttggcaagctccaaaaggatcttcttatatgcctcagaatactccgtgctatccttgatcccctggatatatccgtcgaaagcatcctgagtattgatatcagtagttttcagcgtctctccaaggtcaatgaccgcctcatttttgaggaagttctcttgagcggagttataatcgtctacgagtccctgataaaactcaatctgctgctgaacgttgttgaggacatcttgggatgagtccccaagccagctatcagccatgctttgccagctatcgtcactcaaaagtacgtgctggagttctttgtacattgccaggacttcttctgcgttctttcctgccagtgcatagctaatactgatttgcccgttgacattttcccacgcatcattaacataaccgatctttcgcaaaatctggtcaatgccacctgcgtcagtaacaacgccaagaaaattcgttccagaaccttcagcgttgataccttggttatatcgtgacattgcgtcacggtacttggtatccaaagtatctctggcgtcatacgctgcttgcagtttaatgttgtcgagcttcttgatctcgtcatccagcttgccattaaccagatcaagattatcagcctgcgccccaaccagatccgtaatatctttctggatacgcttcgccgtctctctggcagaagagtcgaagtcgccggcagttgccagctctttatactctgcaatcagatcggcaagcgaattacgctgatcattagccgcctccgcagcctcagtcatagactgacgagcttcttctgcccgttgctttacgctttgccatacctgagccaaagccatgacagcagtaactgccagggtaatccatgtcatagggttagtcgccatcgccgcaaatgcggccttggcgttggccccaacaaccttccaagaaaatgcctgcttctcattcgctgcggtctgttgcagagcagcaacgattgcttccttctgagcagccgtcagtttcttggagtttaggatctcggtcatcattgcggcggtaatctgctcggtcgtccgcttctcggtagctttcgccatattcttggcaagcgtagcagcagtcgttttatccgtagcagccctttccgccaactcttggatcgtatatctctgtgcagaagcaatcagactggtcattgtcatgacctgcttcttctgctccgcagtcagtccaagtgcgctcattgctgccgcacgctgagacttatcaagtcccatcagcttagtagcataatactgtacacttgtggcgctaccgtccataaccacgccagacgctctgatagcctctgtcaccggaaggacagtgctctggagcatattcatttcggcacggaatttataaatcaacgcaatcgcaccaacaagaccgattgtaccaaacaatcccagcttctccgtcagctggtcaatcccgttggaaacaaggttcaaagcatcaacaacgagcttcatatcgtcggtctggaacaggttctgagccacaccaacccatgtttctttcagtgcattcagcttataatccaacgattgcgtaatcttgtccatctcgcgtcctgcgctgccggcgctctcttccatctttacgatggcactacgcgcctgatcaaagttggacaaaatcgcggcaccaatctgagcctgccgtttaccgaacagagcctccaaaaggttagctctattcttatcggtcagctcatcccagatatccgcaatatcggacagaatgtcataggtagaacgataagtctcgggatcgtccgcctcaaacaaactgataccccggttattattgcttgcgaccttagtgagatcggcaatcgtaccggtcaattcggacacgtctgcggagtattcctccgtctcctcatcatagccacggatacgcattgacaaggttttcagaccgttaccaaccgacgccgcgtctcttgtgatttcgatagcggcggtcgccagagctaccgtttcctcaaatgtattgtttgcagcagccatagcagcagagctacgggtcatagcctccacaatatcaccgttggacacggcgaacttattacccacttcgttgaccttggagataataccatccaaagagtcttcaacatcgaggtcgtaagccttgatgatacttaccaagccgtctgtcgcctgggtaatatccatgtcgggagaaatagcttcaaagatagcagagttttctgccagctttgcggcatcttgcatagcatagcccagtcgtgcccattccgccgtctgagaaataacttcctcagtggttacacccagcgctttggctgtgccattggcactatgatagaaacggtcatactcctctctggtcgcggtcgtgactttttgcaggtcaatcatggccgtatccagatcaacgattgtagtaagtgcagatctcagcagccggaacgcacggaagagaagcgtagtagcagatacccactggagtaccttacctacgttgttcttcaaaatgtcgcccaaagactgcatattctttccagcagctttgacctcagatttgaacgtgctaaattgcgccgtccattttctcagatccatctgattgtcaatgcgcttgaggttttcacgcagctgttggaattgcgcattaagaccaggatcttgtttcaatgcactccatgttcttccaaccgtttccaaatcagcttttgctttctccaagttttgagtaaacttgaagtcgttgacatcaccacgctggacgcggagaagttcagacatttccttactgcaagcaccaatcagagattgcagccgctcatatgtcgcaaccttctccctatcccccatatcagcgccatactgtgccgctgtctcccggagcagtctcatattctgcacgagattttctgtgggggccaccacctggctaaacttcgtttgcaaatcagcaatggtagacgggatactctgcattgcgacatcgtaatctcgcgctttgtcagccagctccatctgggtataaaccagttgggtaccattcaaaagacggctctgttcaagagccgtcgcctgcttcgcatattgaataatatcagcatagggaaccagctgtgcctccagagccgcccgctgattattcagcacagacagttgaccttgcaaagccagcaacttgtttttgtcgtcgctggtattcagctttgtcatagaagactgaacagaggtaatctgcttgtccagagagatcaactgagtatagatcttgttcgcaccacgcagccgctcctggaagacagccacatcattgttcagctggtcaaaactgttgaggaaagctaccaactgatctttggtgccgacgccttgcaaagttttcttcaatccgtcgatcttactcttgaacgtgtcggtcagtgttccggcagattccagtcgtttctccaaggcttccagcccggaaagctgatctgccttgatagaaccgatgtcctttgttctcagcttggttgctacatactcggcgttctggtactctttgaccaaacgctgcaagccggaaatctgagcttccagattagagcgttgaacattatccagccgcccttcggcggcaatcatggtctcaatccgggcattgactgcggcgtaagtatcattcagcgctgtcaaatgagcgctatccgtaatcggctttacagaagtttgaccgacataagcggcttgaatatcagccaaaagagccttttggcgattcaagtatgaaacccttgattcattgtccttcttggcctgagccgctacctgctcctgctctctgcgctgacgctccagatttgcagtcacattggtcaaatgggtattgatttcgccagtctccgcattataggtttgcagatacgtgacggttctctgcatctgatccgtaccctgaatggtcagattcagcatacgttcctcttcgccgttcaccgcttcccagcggccagtgattcggtcaatctggatacccatttgatccagttgatcagtcatggcacgagagatgtcggggctgaccttcaaattattaagctcagtcttaatcttgttgacagagctttgatccaagctcaaagaaacaccaacgctttgggattttgttgctctggcgatttgctgagtaatccgctgagtttgagactgaataccagcttcgtccagagttacaccaaccttgatgctgcttttggaattgatcagctttgcaatgttgggaagttgcgcagaaatacgttgtgcggaagcctcttcatcagcctccagctcactggtcaatacaattttcagatcttcgtccacatctctcaccacctttttctgttaaatttcatttcacattgatcccctgtcgtctcagtccagctttcaaagcatttacatgagcgcggctttctttcaggtgctcaatggtttttgcagtaaaaggacgaggctccatatagcgcctacggctgggaaaatcatagtgatagaatttataaccgtctccaaattccaccagctcgggtagatttttaccagtcgttacctgatcgtcgttcatacagccacccggattcggttcagtcatattgaccacgaccatcacgccgccctttgctgctccgcctcggatttcaatgttgtagggatctcccaatccgccgtattctccacggcgacggtacatccgaggggtatagaccttgtacacctcagagtagatggtggcagcttcttcatcctggacttcctcaaagacttcttttgtcattgcgtcgtcgatttttgccataagctgcttgtttgccttttcaagcacttcccgaacgttcatgccgccacctcccactcaataattttctttgttgcttacgcctttcttgagttcagcagaccttgcaggattccaccttcacccagtcctttggtaccttcggaaaggataccggcatactgcatgagcgactccgtgtcgatatccttcaccttatcggccaatccctccagcagatcgcggagagctgtatccgtaccatgatcggcaagaatactgctctttttccagtcaatagcctgcccgcacagaggaaccatctcattcagcatatcctgatatccggcgttctgaacgtgatccaagtccatagccagatacagctcattcatggcatccacatccaaagcggaagcacccgcttcatctgtctcgtttttgagcgtcatggccgggatattggtacacatctggagaatggtagctcgcagcataggcgagacatactcagggcggaacttgcccgtcgcatcgaaacatccagaaaccacacgattcagaaaggtgctcttctctgcgatagtcagagctgtatggaatgacacctcaaaagagctgtcccccacagtaaacgcctgggtgtaagcatcttccttcttgttctctttcagaaaggctttcaccgtatttacagcgattttcttcattttattgatcctccacaagattcattgccacacggaacgtcagttcgtcggcgtgttggctgatccagccgcgatgattttctaccagtcggcataccgccgtccgatcatcacctgcaaaccagttcagataggggacaaaaccggagcgctccgggtggtcgaacaaatcattctgcccctcatgaccgattacgatgattttgcaactgtcatgtaaacgagtcagaaccttcttcaactcgtcaaagtaatagttctgcgcctcgtcgatgattaccactttgttctcaaagttggtaccacgcagaaacgtgtgcgtagcgcactggatatatgcggtttgatacttctcgttgactgcaccatcgtaaaatgcagtattgcgatttacaccgattttttccaatgcttcataaaatggctcaaaatacggctcggatttttcctcaatcgtgcccttcaaatatccttgcttctgctcctgagtaggagaggcaatatagacgatgccattacaccgtccgtattgataaagcaaattggctgtggccgtagcaatcagtgtcttgccggtaccagctttagcattgcaaaacacaatcagcttctccgtgtcccaaatagcatcccgaaaaactttctggtattcatccagtctcagtccataaaaaggatgctcctgcagggtagcggggacatcatagatttccatgctggtatttttctttgccatatcttcttcactcctatcaaagaatggtatcaatgtcagttacaatctcgtcggcaatacccaacacgatcatttcttcactgaacaagaaccaatcacggcgatagttctggtcgtagacttcctccgtgattcgggtgctggacaagatgtactccttcatgcgtttttccaattccttggtaaactccaagttgtccaacattttgccgatgcttccgatcgcaccggaagatccatcatgaatgagacaactggtatgaggaaagacatagcgcttatggccggccatcagcagaagtccgccagcgctgtacactcggcccataccgatcgtataaatcggtgtcttggacaggtggatcatgtcgatgatgtggagcaccgtgtccacgctgccaccatccgaattgatgaagattttgatgggcttacgttcttccggcgcaatccccttatcctcggcattccactttttgatatacaaagcgatatcaatagtggcgtcgctgatatcgtcattccaaagaatctcgcgctttttcaatcggcgataatattccaccatggtgggatcaggcaacgtagtgtctaataccccccccacgtcgataaaatcctcgttaaactcctccatgagcttcttagtcatctcgttctttttcattgaagtcgtcctcgcttccgattttgatattgtttacgacgtaatgcccaatcatcacggcgtccgccaagttgtcgttttcagtaacgatctcataaatatcccttgcagcttgcagcgataggatttttgatgtctttttgcccgtaggttcgacagatgtgatctttgacttgatctcctttgtcgtcctacctcttgctttgcagtaattttgccattgtgtgggtgctaccaaattgtacaaaatattcgttttttcacacatattcacgagtacgccctgtagttgagccagttttttgaaagattgaacattctttctaagctgaatgtcctccaaaaacaccgcatcaatgtcgtgcgttcggatcacctcactaagcaaagcctcaatgtgcaaaattgcctgctcgaatgtatagttcttgttatcaaagccccacgccccatagtccagcagtttctttccctcatagtcataaaccgcccatgcgccgtgtctggcttggtcaacggccaagattttcacccgtctcaccacctttctttatgagtctgaaaaggagggccgaagccctccttcccattactcctgctgcgactcagcctcgttatttacctgttcttcggccttggtttcctccgcttcgactactgctttctttgccctactgttttcgtgcgccaaagcatagatttccgccagcagtgcttgcacactcggcgtatattctgccgtattacgaaggtcgatgccgcgtttccgaagagcgctatatgcctgtttcgcatcgtggttagcctgataccccatgagcaccgtccaaatgtagtagtgctcaggggtgtcagtatgaagcctccagctccgctctttctcacaggaatagcaggttttgtacgaagcgccgcacaccttgcaattccgaatcatggtaaaccgccttactcctcaaagaggatgtagcacagctccgcgtcgtcggcgcagtaatccttcagagcagtgaaggagaaggggtgcgtaccttccgtggtcaggttgaccgtgaagttgttgtcgatcttggccttggggaagacaatcttaccggcacgcttgacagacgggttgcacacgtcagcagccagaatgtccacgacatacatcgcggcctcggcaaagctctcggcgctgtccaccagcttgacggcagaatccgtctcgtactcatagaacacaccaacagtggttccgacgaaggaagcgggcagagtgataaccttgccctcgatcttggcgttaccctcatcaacgccgacctcgatcatgccgctgatgttcttgtcctcgctcatggtgtacacggcagcgggggcagaagtgggcacgtgcttcagcgtagcggtcttggtgcccttgtcgtccgtcacggtgaggatagcaaagtcggcacccttgaccttcttggagctatcggccacctgtacctcagatccaagctgtgcgcccatcaggttcaggttcagcagagacagctcaccagagaagttcacacccttagcggtgtcgaaacgggcgagcaggacgccctgagcgtcagtcttgtcggtagactcgccggtgaactcgatctggggactctccacgctcgtaccggtgaagtccaccaaacccgttgccaggttgatctgagtgatccgacgtaccttgtcgataacaaattgagttgcgttaaacatggtattcatcgtcctttctgtattttttcgggatcatttcagatcccccatccaatgcagttcctttttgtcgagcttcttcatatccacacaaccgctgtaaatgccttgcattacgaagttgtagctcttatgcttctgaacacgctctacgctgtccataaaaacaccgatgggcaacgtccatacgtcatcccatcggtacttaaattctgggcagtttgtcaaagaagagataagaggtagcagtaatgattgaaaaggcttctgcatttgcagtgccatttcatccctgtcatcctcaatcatgatttttctcgtggcgtcattaaatcccgtatccacattctttttcagcttatggatttgacggagatagtcagtcatgagcttatgaatagctcggtcgatcaccacttgatctttattcttcagtacaaggtctgggagacctgtttgtgtaccgagcttaaaggttgtgaagtccatatccccaaaaaggatagacacctcagatttttgaagcgtctgaaaaagggatatgaaaaggtcgtattcgtctatcttctcccagaagacatgaagtttgtcccagatttcaacttttcgatcagcgggtgtcgaacaaatagtgcgtaccagtccgaaataccgctgctcgccaaaatctacgatttcctccaaggtgggttgcctgatcaagattttatcgttgatcttgtatccctctccacgaaacaatttcagctgatcaatcaatgataccagcctccctattcatctcgtgggtaacgtacgggatcgaccacccggagtatccttcgttgaactgaacctcatccgccgtactgagcttgatcccacccagtccgaacaggggcttgtccccgttgttcaaaatgcgatccacctcatctgccagcagatccgctctggaaccctgcagcaagtcaatctggtgctcgttacagataatatagacagtaatccctgtctccttaatcacattcgagtcggtatagaccacacgactacgcatcgtgataaagtttttgtcatctgtttgtgtaccagggacataaaagtgggttttgatgaggggttccgcagggcttttactacccgttttgaaatcctcaaactccgccacgttgttccctacgttacagagcaaattgaccaccgcctgattttgtagcagctttcgtttcagcaagatcttctgttgaatcatcgaatcaaaatgcggcaccctcatcacctccttaccagttcacaatttggattttcataacggcctcactgccggaggcgtcgtggattgccttgatctcaatttgtgttcccacaaatacgggatcatccgacgcccgcagcgtgataacgccgttcatctcatcgacaatgctggccgcgccagcaaagtcatactccaaacgatattggagtggatcaataggaacgccactctcatccaagacttggacacggatttgttttgtctctccgcctgcgatcttgaaatcgccgtccaggtctgtcaatgtgatatggacgcttgctcccgaggtttcctctgtcccaccgggaacagaagtatagtaatccgccaccatcaactcggcgttatcggtagcggcattgaattggtcttccagtacggcccattggatcaagccatcctctgcacgttcgtcgcccactgcatacgagatcggatcaactctggtgatacgataggctgttggatcgaccttgttcttgtccatcaagagccgggtctgagcgtccaacataatcgtttcttcattgtatggcagatagatcaggtgctggtcttcaccaaccgtcatctgcgttttacccgcctcaccagtgccatactgtgtgctgtttgtgctatatacggggtattctacaatctcacctgtcaaaggggagacgaatcggatagagtatttgcacttccagagtaccgccttttcataaatgcggttgttatccggcagcgaactcaccagccaaaacgccccgtcgtgtttcacgtactgcccacatctcaagataccgatattgcaaagaatctgtctaaccgttgtgctgttatacacatcgctggttttctgttggacaatagctcttacctgctgcggctcagttccaatcgccttatcgtagatcaaaatatcagacccgataaaggaatcgagcacttcctgaaaaccatcttggccgtatgcccaaaactcatcatcctcaaacccgctgttgaaaagagggcgtgtcattcgataccagcttttggattcttctgacatattgctccccccttatccatacgcaggatctttctgacgatgaagcaaaacttcaaccttggcaatctggtcgtcaagttcctgttttgttacacgtttggtcgcatcttggccggttagctgaacatcctttccatagatcccgttcagcgccattaccctgctcagttccctttgcaggtaagacacatacatcatctgggcgagagtacgaacggcaatacttttcaacttgccagaaaactcgcgtgtctcctcgttatacccgaggtcacagcccaaattcagttcaaaatctgctaccgctgtggatagccattctgcttccaatgcctccgggatctcatatttagtcaaaggcatggagtggaatttttgctcaacgtccgcaaaggtcgttttcttttcgtccgccataatccacaccttttcctttcatcggttagaccttggcagtctcagccagcttgcgcagagcgtccaccttccaggactccgcgtcctcagcgcccgcactaaacgccagctccacgagcattctcttttcggcgtcggttttcaccatagcttccagctgctcgttgaacttggctttggagcgaatagccaacagttccttaacgctttcctcattcaagaggataggagtggaaacttcggcgtcgcccaggccgaacagctccttacgctttgcctcgtccacgatctgaatacgggcatgattgcccataccatcagtgccggtaaacatcacgttgccggtttggatctgagccagaacctcctcttcggagaggagggggaaattccgagctttgcccggaattgcgatatcgccctgccccgccaaacgccgaaagcccagaggccaggagcaaaggttgtttaccagaacattattcgttttcataacgattcccctttgattgaaattaggggaggggtttgcgcccctccccgtttgtgccgtcattcaggcataaaaaaagacctctcacttaaaaagtgggagcatcaaagttcgtatcggagatcagaccgatctgatcttccatgccctcggcaacgcctgcgccgaactccatatcgaagcgggtcaggtgctgacgggttacgatgtcgtcgccagtcatggtggtcagtccgccacgcaggaagacctgcagaggagacacagaaccacgaggcaggaagaacagcagaccctggggcatatacaggtcataatcggtgccgtccttgttcaactgagtccagttgatcgcgttgggcagctcggttacgaaagcaccgttgtacatacttaccagaccagtctggcggatttcctcggcaacaatgttgttggcgtagcggatctcatcggcggagaactgcttgaagccagcgaagtcgttgaactgagacactacgctgtaatcgccggcaatgttgaccttaccatagcgacgcatggacttgagcatattgtcaacagcggtcttggtgatgccgttgtcctcagcgaagtgcttcacacccttggcgtttttcagggcgttgtacagaacggtcatgacgtagtaggtcatcttgttctgcatatcaatctgcacttggttcataccctcacggatattgccgtcgaagttaccgttctgaagctcgcggtagtcaacagcaaaaccggcagagatggtctgggtgccgatcggatactcacgccaattcacagcggcgaagggtacgtcgctgctggatgcctggaatcgagaatcgatgctctcgtatccgtaggtcttcatcatgggagcctcgttgtaaccgatccggcgatatgtgcccatgaagtcgaacaggcgaacaacctccaacagcttcggctcaatagagaaccggatgatggagttgatttcgctacgggcggcgttatcgccgtcgatagccttgctggacagctctttgatggttgccacgctcttgtccagagtcttgtcgtcaacctcggggcgcttaccggcgctcagagcagaaaatacctccacgatcttggagttctgcttgacacgaccagtattcacatcagcctgagcgttgctcatgttgatttcataaatcgtgctcatcgtttatccctctctttctcttcttactgcacgcggacaacgacgaggacgcccttgcccatgtatgcggtcttcttcgtaacctcgaagtacaccttgtaaccggttacgtcggtgctcttagcgagcaggccatccgtaccaaagaccagcttatcgccaacagagatgccggcatagtcggtgctgatctcatagctggcaaactccatctccagatttgccacagtggtcaggtcgtcggcgcgtaccttctcgccggccttgaccgtcaacgtctcctcgaaattacgcatttcgggcttgtcgttgatattgctcacgatgcggaagcaagccttagcctcctcctcagaggcgggcaggttggcagtacgagcggcgcgattcagcaccacacccatgccgaccttcagatcgacggcggcattaacgtcgccaacgttctgcacgttcttgtagtaaccaatcgtcttagccttcattgtttttcatccctttcttaaaatacgtccacgtcggcgggatcggtgttctccttcttgccggcgtcatccgtcatgccaaatacgtcaatctggctggcggcattggtttctgcgatttgactctcacgagccgcctgcaccatagcggtgcagattttgccaacgatgctgttgatctctacgctgccgggattggaattgaaagcgtcgatatcttccttggcaactgcacgttgctcctcggtgtagggagccagtgcagcattcagttctgccacggcagcggcgttctgcatttcggtgattttggcattagcctcaacgaggctggcctctgccgcttccttcgcggcgttagcctcagtcagtccggcctctgccgcttccttcgcggcggcttccttgtcgtaatccgcctgaagctgcttgatatcagcttccttctgtgcgatgtcagctttcagctggctaatctcagccagaagcgtgtcaactttggcccaatactcctcccacttggagttgacctcagagacagcaccagtcacagccgccatcaactcgttcttggtcttctcgtccattgttccatcctccttgtccagttttttattatttagctccattacgatggcggcttcatcagccggtttaacactgagaatcgcatatccgctgtaatcgtaatactgcggaacacgaccttcctctttccaaccgccggagtaaataatgtatccatcgtgctcgggcttacccacaatttccacggaacccttaacaacagagtccgccatattttcgcggagccaagcaacaaacttgggataacgcatttcatccagcgttccttctgctaccaagcagcgtttagtaacgcctccgatttctacgtcatccacatacgccttgtcgaagtgtccaaccatagtggcgtcttcaaacaaaggcagcttatcctcctcccgtacatccgtcataccgtggttgtatggaacgtcccgatcttcggtcaaaaattccgctacaatcgacattccgacaacggagtggaggttagcttgaacatattcctctttccacgagattccgttttcctgccaacgagtgttatcagggaagatctcatgcaatacaaccttgataggtcgtctgccggcaatcttattttcactggagatctcatagataggggcaaaagctctctcagacatactctcacctccttatcctgacggagaggggcttgcgttagcattattagcctttgtagactctgtgcttgaattgaccggaggatcgccaccggtgctcttgtccacatcaccgtcaggcgcatccttaccggtaacagtgaacgaggtcttatgcacagggtacttgttctcaaagtcttcatccaactcaagatccataagagagaggtagtcatccacgtcaaaccctgtagatgcaatccatgccatcaagctgccctttccacgggcatacaggtcagagaaaaacttcacctgtttttctcgattgacaaaagtaatgggaagcacccggaactccacccggtagctgccgtccctgattacgttgtaattcaagcacttgttcagctcttccaccaaagcctcaatccacgtgaatacgttattcgcaacgatttccatattcagtgtggccgtggcatagttacccgtagaactgccactcagagcagcagcggccacgccgatgtcctcattcacatcctctttgatggcattttcgttttcctcattcaaaagggagagatcaaccggaagccgatccatctttgtgccagaagccaaagagaagaatgatacaccgtttgtgttgctgcgttgcgtcagcgcttgcttgactgtgttatgctggttttcttgctgtgactgagacagagcagatgtacccttgtcctttccctcggggaaagtctcatagtaaatctggttattgaccgtatccaacacacgccgcttcgtattgatgaagtatttggcgtagtcgatatcgtccaacgcggctactgcaaaaggcacaccgtacggatcgttctgtccgctcttgatcttggttacaatcgtcttgcgccagtccagtctctgccagcacgcaccatccgggaactctccattggaatatctgcgccatccttcttgaatctgacgagggaagccttgcagcttacgcttacgatctccctctgtcatggcgctaaaataccgcaggtcaaacgctacttcgtagcagttgttcctgcggccaatgattcttgtatattctaccggcaaagaaataacaacacagttgacgccggctgagttaatctcggtgatgccttggatatcaagatcagtcagcgcaagccgatcgtctactggtactgttctcgtctccatgtaccccacgtacataccctcattggcatcgtggaatagaccgtcacgaataacctccttgtagcgcatcgaccggagtacgctggtcatcttgtccatgctggcacgataccctttacgggggcctcccgctttcttgggcttaacaactaccacataatcaagggagtgaagactaaccaggctatcaatagctgtcgtcaccgtgccgtttgagtaatacgcccacttcgcccattgacgcaattcagagatgtactgcataggatctctcgccattcgcgtgatttcttccgtggaatacggtgccgtacatttcgtaccgtagttgaccacgttcaaataagacgaacccaaacgcgtgttgaactcataggtcttgtcgtcctgcggcgcactgtttacttgcgacataggtactgcggcctgcgtttcagattgattccggcccataatccgaccaaagaatgattttcctgccacttgtcttcacctcctttaattacaaagtgttacgtattcatacccggagctatccgagaaaagatccgcctccaaaagtgaaacgaaatagttgccataagatactgatgtataccggtctttccgcgcacctgggcgttcctcaatcttaatgaggttggtctggttctgcacagtatactccaacccaatcatctcattgatcaacgccactgtctcaaggaaaggacgctcatagaaaagttgggtatctacatcggcagagacatactcaggatacaagcgctgcaattcttcaacgccctcttggttgcttaccatgagttcgatcatccggttattcaaactatcccgcatagagacagcaattttgctgttcagctccaaggacgccttaaccgagaataccgcctctttctggcctgcaattacgatacgagctttcagcttatcatcgttcatacacgtccaaggttcgtattctacgttccgatctacgtcataaagcactttagccaaagcgtcgtaaatagcgacacccgcgtttcgtgtatccaaaacgcaataatccgcctcaaagtcagcgaacagctgcttaatgcgaatggcttgttttgtcgtttcaaattctgcctgcggctccatatagactacctgccgacgatatccctgcttgacctcaatatgatctccgctggtatctgagaccttatactccttgctctcagggagagcacgaatgcaagtaaataccgagttatcgttgccggtaccgccctccggggcaatatcgcacgcgataatacggatttctcctgcctgtttgggaattgtgtgctttgccttgacctttgacagtacgtcctcgttcttccttggataaaacggacgtttcaacacacggttcttgttcagcatatcgtaggtgaagtaagcatgagcattctcggccaccatctgattttcatactcaatcgtccaggcaaccctatccagcttctttcgctccttcaccaagaagtcacgggttttaatctcgtgcttcaaagcgatgctgtaatccataccaatcagaacagatttgcccttgcccaacatatcgcgggtcacgagcttcatgtaatcccacatccagtgagatttgtaccatgcagagctgatatagatttctttcggttcctctttcagttctttgtactcgtcggggtacttgattctgaacggaatctgccgctggaacagcgtaggagaaagaaccgtgtcgataatgcttttcacaatcatacggaactcttcataaatgaagaccgtagcacggtatccacgcacattctcattggcaaccaatacaacaatagagcttccgttattaaacttcacttcgatatcgttctggttgtccttgatggtcttaatctcctgttgaagcaacggagatcttggcaaaatctctttggcgattttttctgatacgatcaatctcgcctgcttttttgtcgccgaagctacgacgatcaatgatccaggccgcaaaattgcttctttacaggcatagaccgcaatgataaatgactttgccgcactacgagcggccacaatgcagatactcggaaaaatatccatcagatacaaaatgatgtgctgatagagatacagtgtgattccgaaataccgctgcacaaagcggctggggttccttcgccaaaacgttatccaatccaatagctttttgacaaactcagggtcgttcaatttgctattgggtgagaaatgttcatggacgtgtttttgtcgcccatccatcaacgcttcgtaatccataactcactcctccgaatcagacaggctaaattccttgtccagttccttagagccggtcaatagattgcgaagaggtctggtcatgaaccgctcaatatactccttcaaatgatcgaagtccgcatacagcttcttgtccttgtaatattcagccggacaaaactcctcgatatctcgaatcatttctcccaaaggactcagctgcttttcagcctcagcctttttcttccggtcttcgatctcagtagtagctgcgtcaatctgcgacttgtagctattcgcagccgtaccaatgttggaatcccccttctgaagcagcttccgcaggttgagcttcataaagcagatcgaaacgtacagctcctcctgccgcttatccatcggctcgccgtatcgctttacccaatcctgatactcgtactgcatagaatcgtagtcgccagcatcaaaaccgacaccaaaccggcgcacaacctcctcgggcgtctggatgtcgtcattttttgccacatcctccaccgtaggtgcgttttccacattggcttcccagcgccgcaccaatgtatcagagtaggtcgttgctccgtctacctggctcaaattcagtctggaaatataggtactgatccgattgcgactctttccattgcggctctcactgatctttcgtgacgacgcccagatatccaaatcaaagtacatatccgtgatctggcaaatccgctctgccgccgcatcttcgtctccgtcatagaactttacgtactgttcgtaaagctctgcaacacagttcttacagatagagacaaagccgttgttgcccttataaataggggactttgaacggccaaaattagtctcctgttttttgtacttgtggccgcagcaggtacagcgatattcttcatcgctgattacacgcggctcaacttcggtaggcttcgcatctttcactaccttttgcgtagccggtttcatcagctgtttctttgccgccatgtccgcgacctcctttctatatgacaaaacctcggaagtccaaagactccgaggttttctcaatcgttattatttcttctggtgcgcctgaagggatttgaacccccgacccacgcattaaaagtgcgctgctctcccaactgagctacaggcgcatatgttgtatgaagtgactccactcccggcctcaccacacacctttaccttggattccgaccgccactcacagccgtgatatgttatctcaatcaggcaataattccgatttgcacggttactacacttatttatcctccattgctgactaccattagaggggcatactttcccaggctcacgaagtcccgttggggtatgccagcccgccgcgctcctgatcggcttgccgctttgcttacagcgtttaggttggtctatcgcgttttgcctgcgccggactttcaccggagggagcgaccccaatctacctgcacacggccaatttttattttaccgacgtgtcagagccgtcacacgtcatcataggtagtatccttacggactggtgggatgagaaggaatcgaacctccgacgcgcagggcttcaacctgccgctcttccaactgagctatcatcccatagcgctacgcatttttgtttatcggcattgcacaggacagcgtagcaaagtccaccgtcccctatcgctggaaccgcgccgctttcgtaccgtttgtcttggggtcgttagaaagcagtaaatatcaacacatcccgttggcggcggaagtaggactcgaacccacaagccgctcatcacgaccaacagttttcaagactgctccccgcacctactggggtcaattccgccacttgtaaaatttaggcacacattattttttcaagctgatcgtacccaacccgagctgcccattctgcgtgctcaaagaacacaacagcctttccatgatcgtctcgaatgtataggcaaagtgtttttgctccattcaccggggacacataatacattaaagatccaaacgggaacttcattgaatcacccactcgtcaatttgaacccgaccttatttcagttgcatatcgggtagcaacaaatatttgtatggtaggggaggtgggagtcgaacccactcagctcgaaagcaacggttttacagaccgccccagctctccaactctggcgctcccctatatttactattcttatattggtgcgggtagagggggttgaacccacgaccttctgattaagagtcagctgctctaccaactgagctatacccgcatatggagctggtggacggacttgaacccccgacctactgattacaaatcagccactctaccaactgagctacaccagcatatggagctgacacagagactcgaactctgaacctattgcttacgaagcaaccgctctaccattagagctatgtcagcatggcaggggttgaaggacttgaaccctcacctacatcggttttggagaccggagtgctaccaattacaccaaacccctataaaaatggcgacgtgtacgggacttgaacccgtgacctccgacgtgacaggccagcgctctactcttctgagctaacacgccatatacagcaaccatttatggttgcatttttattttgcaaccaatttaggttgctttggtgatgcgtccggggatcgaacccggaaattccaccttgaaagggtggtgactctaccaattcgtccaacgcaccatgttggtaccgctaatgggactcgaacccatacgggatttctcccaccagcacctcaagctggcgcgtctgcctattccaccatagcagcatatttggatttatttgtcccaatcaattaaagggtatagatcatagggcgaatccccagtcgcaattttctcatatccgccatccacaatacgccatagcgtatgcttcttcttttctggattttggctgatctgatactgcttgcccgacctcgttgtacacagcacaccggtaccgcactcagaggcggaaatctttttaacgatttttgatgttttttctttcgttacgcccgaatctttcttcggcatgattgcacctgctttataaattatggcaaggcgcttccagttggaagccttattgcggcaagcagttcatgagactactctttctgttataacaacttgtgcgcacaagccccttcacagatccacctctggtactcccaacgagactcgaactcgtattgccgacttgagaggccggcctcctattccagttagaggatgggagcatatataaaaatgcgggcaaggatttacaccttgcatgatagcaccccttgcagagcaagatacttccacgtctaccttcccaatcgcccacagcgtctacttattccgccaccgcatttattttattggctggggtagcaggactcgaacctgcggtcgagggtaaacctcttgtcggagtcaaagtccgatgccttaccagcttggcgataccccaatatggagataccgataggatttgaacctatgatcctggggttgcagcccagagccttgccacttggctacggtatcataagctgacttcagcggtaatggatgtcagccccattgattaacgccccactcataaggccaccgctatttataatatcgtttcgcccaaaatgggagagctgtggtggcagtagcaggactcgaacctgcgtcttacgacgtatgaggtcgtgctggagccatctccagtcatactgccatatacggtttgcgtggctcacatcacttgtacttcgtgattgcaaccctctcatcccagtgctggcactgggtcgagtgaccatcaaaaccgaaaaaatggtgcagggctgtgatttaatgcagatacgccttggtgccgaaggtgggacttgaacccacacggtatcgctaccagaggattttgagtcctccgcgtctgccgattccaccactccggcatatggagcgagtgacggggatcgaacccgcatccccggcttggaaggccggtgccctggccgttgtgctacacccgcatatggtgtccagtgacgggatcgaaccgccgaccctttgcttgtagggcaaatgctctcccagctgagctaaccggacagatcggcttactcacaccgtaagccatggtgccggctcgtacttcgcctgccggattgcgccggttttactcccaaaaccttgtaaaagtcatcactgccagatgtgaaggtttctatttcccattcggtttacagtctccgctctgttcgtgggacgggcatggttgcgggggcaggactcgaacctgcgaccaccagcttatgaggctggtaagctaccactgctacaccccgcaatatggctgacccggcaggactcgaacctgcgaccatctgattaacagtcagacgctctaccatctgagctacgggccaatatagatctacgagacgcattcttaacgacaccacatttgttcggcatatgcttagttaaaggcgatgatttttctatttcaagtagaattgttttcaaaattgctgttagcgtctcaaaatacggaacacggttgttctttttcccataaaaagtttttgaaagttgctgtacgtgccccaaaaatggtagaagatgccggactcgaaccgttcttcctgctccctgggcaggcgtgctaccgttatcactacatcctctatatatggtggagccgaggggaatcgaacccctgtccgaaatccctacatgaataaaacagtcttacgcaatagacaacactttatcaattcgcctcaaactgagacgggcggatcagcagttgtcactccgcgcccagggcgcaccggttagatgcacctccaccaccttgtttcttttcacagtgacaaggaaaactgcaatactctgaccgaatcttcgacctcagatgtttacccggtcagtgggtacatcgttttggaatccagccgtcgtcaggcggcaattccctttgctgcaagagcagcggaaaaagcgggatggatcattacaacagtcgtatcgttgtcatttcatttttgtttaagccttgaggcggtcttctacctgcgagtcttactctctcagaaccccgtcgaacccattacggccccatatgaaattgtcaaggtgtaccggttcgggcgtaggcgctgcccgaccacgttccccaatccctgcatatcccagacggcgaatcttatcggcacttggaaggggaagtcttgcagttcatagagaaagatatgtgccacagccgtatctcccgccttgtcatcggcattcggtcaaaataccattcctgtggcgaatgggactggtcgggacaaaaaggatcgaacttttgacctcacgattatcaatcgtgtgctctaccaactgagctatatcccgatattacggcagacgcatctgccgtaatagctgtacgtccgaaaaacctcgtctgcagccgataggcttttggctgagatagcagtaaaagtaatgagctgaaccgcacaaacgccaacttagccaatacagcatagtggtggaaccagggaggatcgaactcccgaccccctgcttgcaaggcaggcgctctcccagctgagctatggccccatatgtccgccccctaataaggggcggcgctgttttcgttgattttctttgtcgctatggtcatatgataccataggcatttctggatgtcaatagctacaaagaaaattattttatatttttttgtgtcactgctgcgagtctgtaccggcgcgaacatcctctttcaggctgttactggctcggaacgtgggcaccttgctatcgctcgatacccgcatctccccggtggagatgtttttgctattgcggccttttctggttttcacctcaaaggttccgaaacctctgagctgtacctgctccccgcgaaccagcgcgtctctgatgatttggagcacttcgtccaccacatcattggcctgattcttgtagtagcctttctcgcacagagcggacacgatatcggccttaaccattgtcccactccttaattcaatttgatctgatagcaggcatccgcacctactccggggcggaaaaccatcatcagctgtgccggagtcgaatagagccgttttccgttagcataatcatccgtaccacacaagcagggtgcgatcatactctcgattcccagctcttcaaactcctctttatggtgtttatcggccaacaccacatagtcaatatcgctggaatacttcttggcgaacagcgtgtgcagcgtctttccggcgtttttcacgttgtccaagtcaccatgggcggcacaaatgttatacccgcatacggagaagtacaagaactcgtaatactccgactccgggaaaacgatatcaccgcgatcacgaagccgctgttcaagccaccaagggatcagccgctccatgttatctgcatgaatgctgtcgtttttattttgaacggttctcaaatgatttccgtaggtcgcgtgaactactgtctgctcaacctcatcggccaaaacactgatcgcctgtgccataatttctgacacctgcatgatctggtcgcacgtcagctcctcagaggcaacacgcgcactggtgtgtattgaaccatgagccgcgtcgcccaacaacacgacatgaagtctatggcatttattcagcctgatacgctcaactgctcgctcaaccagccgttccacacgataacggcatacctgagtatcataccgctcccagatattgtccgttaccataccgtaatgccagtcggcaaacacaagaacagcctcagcgtcgccaaggaacatacaaaagtcgtccggcttattaaccgatagcggcaaagactcattcagattctgagcagccttaacgagccgatcttccagattttcctcacgacccatccgatcgaccatcttattgaactcgcggcgctggtcatagaagcgtttggcctctttacgcatctccgcaattttgcagtttagctcgcccatataatcatcctggccgggattaccctgagcggcatactttttcttgaaatactgcgcaacagcatagccggagtatggcgttacagatgccgcctttctcaaactatcccgatggcattcgatgccagttgcttcaacgatgtcttcccagtccagatcgtcgggcttctgttcgactttgatttcgattaggcgaagaccatattcatatgcatcctcaccttctctgcgttcatactttggattcacgaatgtcttcacccctattctgctggcagaagcgtgctctgcctgatttcaatttcaatgtttggtacgccggcccaacgctccaagatctccttgatatcgtaagtccgagcaccattcacgtcatactccgtcagcgtcatatcggagcagtcgatcgtcgcgtgagaatatacctcacgctgctcccgcaccgccatttacttgtgctcctcgatcacgttcatacgacgaatttcgttcagctttgcaagcagctcaggggattcgacgcagaaataatgacccctcttcgagtcctgcttcatcgtccgaggataacagtagtagtggggatacttatgcggagggaacgctttgaccagcagatctttctctgtcttgttaataggaaccacgagaaccatccttttctaataaatttgagggtactccctcaaaattacaccaaatttaggacttgggaactcccgacaacaaatgggagttcccaacgtggttttagaattattcgaccaacaaacccgaaaatctgtataaaattgtgaaaattcaacagttatcggacattgtttttgggcatatcgccgtttctctacggaaatggaacccataaatttccacgtcccacaggccgtcagaaacctcagtcaacgttgaaatgggtgcccgactctgctcaatcaagtccaaaaagcactgattaggtgccgaaaacaacgtataaaacaaggtgcgtgagatatctttattctgaggctcctcaatggcgagcatcaaccgatatgcagtatgaggactgatccgcagtgacttaatatagttgatatactcctgccgaatctcatgtaccaggattgccttaccgtagttatccaggttttcgtctgttccatcccaaactgcccggatcttagatctcatatctctgacaaactccaagatccgctcgacctgtgaatagctcacagatttttgcagataggcgtcgtttaccaacagttcagaaaacgggatgaacgacgtataagcatagcttgtacggtaagagttcaggctgtgctgcaaaaagtccatcgtcgtattgtggaagcgatagtttttgcccacactgtcataatagcccttcatacgggcgatcttcccgaaaaagttgggctttacttgccggccatcatcgtcgcgtatctcatatttttttctcaaccgtttgatttctgcaacactgtctacggcatattctcgcttcgctttatcaatctcgatgttactcaaaacgtccagctgggcgatctcgcagtaaagctcctcatactcggaaaaatctgctccgctgttcagcgcatcccacagcttcgtattcagctcttgggagaggtttacgatctcgccgatcttattgaccgatgttttgatatccagatcagactgatctgatttggtataatgacgcacgattttcttagcgtctaccatgctggtcgggacgaggaacttgtgatagttccgttctgcggcccgaataaggatggcgttgttcgtcagcaacatagtatcagagtcaaagtctgcaccggataaccggaaaagaatattctcgccgatactgttgatacacacgatctctcgtgtggtattgacgtactgccggatctcctcgttatccgtattcctcgccaagagtacgtttcccatcgtcacatggggactgcgcgatccgagaatagtctgatcaaaagcaaactgttggcaaaaaatattgcctactccgattttactctcaccatcaaattgcccaatcgcagagtagagcatttcgatggggtttcccagcagagttgaatagttcccttctacaaggatgtgtccacgggccagctcttttttgaacgacttcgatacgtcggttttgaagttgtggtacagcttcgtttgagaaaacttatctgtgacgcccaacatctgatataccacatcgttcgtcgtcgtaattccgtcgctgtcgatctcctcattcccgcccatatatttgatatggtaccgcagcaccgcaggatctgtctggatcatgcgcagataatccaacgacggttttaccaactggtcaacatcatcttgcgaaagctgaagagtattcaaaagctggtaatggatctgcaccatgcggccatcaaagaaatgcgtcggcttctcatgcttcacgacaccaaagttaccgtcttcgtccagtaatctcagccactgttccaaagtgccaaacttcacgtacttaatactactgggcgtagtaataaccttgatatcgctgatatcctgcgccagcgtgaaaccggaaagctgggacacatcagtaatgccacgatcagcgaaaaacttctggatattggtattaaagcaggccgatttgaaaaaccggttccgcagaaggatcataccgtaatcctgccattcgcccatagcacttttgtcaatgagagactgtccgtcccaaatgctattctcgatctcaacctcttccggctttgaagtaagccagttatcgctgccaatccttgtcgccacaacgcgatctttgaacacgctcttatagtcgtcgattaccaagaagttctcgggccgcagcggaatagtaccaacgatgctgctcagagtaagggcgatataggcttccagagcggccagatcaatctcctgaccctctttcactttcagcccacaaagctcccacttgtgcattcttggatacaactgctcatcaatgaacaggcactttccaattcggctgctcccgcttgaacgcttgaacctacggaacacaataccatcgcacgtgaatccgtcctgataaagacgattccgaagctgggctacggtaagaagtaccttcatggttttcccgagccgatacattccgttatcaaaaacgaacagatctcccagctcttggggagaggccggattttcgacgggagatcctacccgtacagcaatcagttccccatccttgatacaaatgttgtcggtaagctgcacatcctgcggcagatagccatacttgatgtaggtgttgtcaaagaagcgattgaactccttgacgctatacttgaacgtgacattgatcacgcgccggcagtattctttaccccgcttactgaatgtgaagtccatacggcggtataccttctcataaacttccctcagctttatcaggtcgaggctataatccaaagtgttgacaaaacgtcttgtattgaactggtcgttgtggtctgatccagccagcttcacagaatattccttactgttcgggcttgaatagttcgccaaaaacaaatccttggcatccacagacacgatatagaccgaattacccatggtctattcaccttcctcagtttgaatattttcgacttgaatcagatccccataccagaacaaccaggtctctacgccctccagctcgatcagagcagagaacccatcgggtcgttcacgatgcggatgcgcaacaaataccttatcacggctggactccacgaattgacggtactctccctgcatacgcggataatccttccgagctatgatttgatccacattcagagtgaccaaatccccatcacgaatctttttgtcaatctcatttccgaggctttccaggacatccgcagcaagtgtgcgtgagcctttgtccctgagcttctttttcaaagctctgcgattttcacggttcaaacacattaccccctgtctgaatattcctgaattaccttttcgtactcctgagcgttctctttcaaaacgccctgatagaacacttcgttttcccctgcgtcgtcagccggagaatagtcatcacacttcccctggcactccgagccacattggtcataccaaatacaattttttcgtgcggtgttcattgtaagcctccttccgctacacaccgccgcgtcagctctcttaaatttcaagttccctatatgatcaaatgaatcgttgacgccgcattagtctgtcgtgtttccatgagagatgccgtttaaccaattccgaaacagttccctcatccgcctgcttggaatgtagatccagatttctttgccatcacgaatagctgaccgccatacccactggatcatctcactcaacgcataatcatcctcgcgcacctcaactccttgctcctgaaaatagtttttcagcaaagggttgtagtacacgttgacgcaataggccaagcagtccctgttccgatatgcgttagtagcccggacattgcaggaaaggaaacccttggtatatcctttgcctttcaggagggcttggtaatccttaaaaaccgtccacaagttacggtctgatgaagaattgagcatattcttgaacaagttcgtcaaattgtttctcagctgtttgataagcggctgtcctttggtatcacgcgctttcttataccaagaaacagataggctcgacctcatttcgccgatcttattcagtttctcatcctcgatgatatgaattttctttgggagttctgctacgtaatccggtatgtgaggtgtatcgctgaaatgatataccccgttctcacaaaccgttccgatccgctggacttcgatattatgaatgtcgaagtaatatttctgcacctgagcatcgaacatataggtgagaatgatcacctcatcgaaggactgaaatacctcaatcgggaatttccatagcaagaggcagtcattatacaaaatgacgttgccagtcatgcacatatcccgcaagtcttcaaatctgccctcgtagtcatcatttacccaccgcacacggtactcagagtcaacctcgatcatctcccgcttgagcatttgcaaatcctttggagaaatcggaattgtctgaacggcttggaaaacctcatccaaaatgagcttatagccgccgtcttggatcagcgaaatcgtttcatcgttatacgactcaaacagcgcatgggtgctggcgatgttatccctcatagacagaaggtaatgcaggttttccaacttacccttacctttactttgcggatctttgaattttcgcccactgcaactccgtttgattcgttctacttcgtccaggtatggcgtgataaatacgtagcggctttccttatcttgattcatcaaagtgatcgcagactcggttttacctgctcccataatcgtgtcacataccttaacgatcacacgctttcctccttcgccgtcttacggtaatagaagaattggagctgctgaacatagccggcaaatccggcgtactgagaaggatcgaaattgccatggtagacatcatcaatcatgcggttgatccacacatccctggggtaactgtccatacggtgaagcccaaacagcatcacacagttcgcaaccttctcgccaatgccccgcagagcaatcagtgtcttccgggccgtatcgtcatcctgcttctggagctgcacccagaaatcttcgtcatactcggccatctctttcacatagctttcacgatagcccagcgatgccggtgacagatcctgacctctcagctgcgccggcgtcgggaaggaatagaactgctggtcgtcgatctcccccagcggcgtaccgaatgtctggcagagaacatctaccgctttgcgaatgcgcgggatgttgttacgctgggagataataaaggtcactaccatttcccacaaatcctgtctcaggatgcggataccgccacctgctgcgatcgcctcccgcaaaaacgggtctccggccatcttctgctgatatgcttcatagtcggcagacaggtcaaaatagggcatccatacatcccggaactcatcataggggcagtgaaaaacatacccgccattggtactcggtgtgattttcaccagcttcataccggtgatcgccacatatcccctatcctgcagtgcggtcagccggaagcactggccggaatctgcaatctgcttcaaatcaaacgtatggggaatgttaatgagcacaccatcagaaaccctccggcaaattaccttttcgccactcatcatactcgctccttttcttcaaatatttgcggattatgctcagtccgcagtacaccagatcgcaatacggcttggagccgtcgccatcgtattgggtaattgctgatacaacctcctgctccgtcagattctccggcacataccggaacagctcaaatacctcctgcattttctcaatgaggcggatattatcggcgcaggttttgacttgactcttagccagcgtcagcattgtcgccgggtcaattccatagagtcttgcggcatttctatacgcttgcacctcttcaaacagagcggcacgctcctgattcatacgcaggatcgtcgcttcagactcgtttagtctgcgcgtcaactctttaagatcgtccactgcacgcgctcctttctgattgatttactttgttgctatttgagggtcaaactttcttcactatgcagccatagcctctgcacgtccggccatatcccatcttgtctccgaataggccgttgtcgtccagattacgaatagttgcctgcttttcattgagttttaagatctcaccgttccgaagctcttggtacttggagtcaatgtaggccacacggtcgccgaccataagctcctgaccgaaaaaatcataatgcttcatatatccaccgccttatccaaactccacacaaccgcattcgggcgcttccttgtgggcgctttgttccttctcgccgtcccacttccaggcgggaacgagcttacgaagatcagacacggcggcgtcgcgctctgcccgcagcgttttcactttctccgcacacttataccagttcgagcgcagcccgtcgcattccactctgagctttttaagctcctccaaccagtgggcgagctgttcatgctcggtagtgcaggtatcacaagggttgctttttctcagtctttccactatctcatagcaatgttgaattgcttcatccaaagtaaacatggtgctactttccctgttttcttcgtaaatctctttgccgtcttcgtcgtacagatcatttactttttgcactcttttggcgcggagggcggagatcgccttatcatacgctgctaaaatagcggcatcgtccatgagcaaatcacagtgggcgcagtcagagcagttgattgccgtcttcctctgtacgcactgtttttcccgttccaaaacttcaatgtcggtcattcagatgcaccgcctttcaaagtagaacgtaattttctttggcgttggcttaaccataccaaaccgtacagcctgacggtaagtatagcagtcacgctccaatgtggccggcatagcttccagtattcgccgccagccctccaatgagttgccgcgcttgtagtgattacagctccgacaggccggcagcatatttgccagatcgtcttcgcccttactcctcagtgcaacaacgtgatcgacttgcatatcctcatagttcagctgctcgccgcagtatgcacaccgcccacccatcttgtcataaacggcgcggcgctctgccggcgtcagcctacgtctcttttccattcataaattctccttccgctcattctccaacttgtttatccgatgcgctataaacaagttctttccgcagctcatccttcaatctgcgcttagccaaccgcttgttagactttttggcttttgcccacccattgtggttgttcgcccagcaagcatatctgtggctaaactcagactgccagccgagttttcctttataagtgttagccttcttcatagttcacatcacatttctgctctgacccgcataaggattttaccaagacgattttctccaacgccatcacagacgccccagatgcggtcgccccaagtattgccttcaatgagttcggcatccttggtcgcaacaagcttgtctgccaaatcaggattctgtgagaactttgccttgcaaatctcatacataacggtatctttgaccgcctcccagtcaccacggagcttaaccctacgcccaagcctctttgcctctgacggattcagacggcaaaactcagtcatacgttctgggcatttagccgcttgaaacgccgcctcgttattctcaaaacacattccgttgtaggtaactggtgccgagtagaagttactcagaaaataatactcacctctaaactcgctgatacttactcccatgttatacctccatcatttcgtatatacagagcatatgtccgggtgtgcctcctcagaaacccttatatcccaggacgaccacaaatcggtcgtcatccaatacctgattgagaacaggccgtacctgcttctcatagtccagcttgcccagcccacagccaacaggcggaaggtagattttggagagctggaacttggcggcgatctcttttagctgtaccgcagatctcataataagatccaagtcagaattgtcacggtagtggtgcttggtaggaaatgttaccagagatgtaaggcgatcccccaccctatggacacccatatagaatgcacggtttccataccgccgcaggtactcacctaactgatgttccaaaccgggaacgagctttttcgcttccagcgcctgccctttaccgagtacggcgtccccgttcttacgaatcacgccgttggtggtgacgaccgcagcctcatgttcgttttgagaaagatagaagagactaccggtgttttgtatctcgatcatgaccgtaccttattaccgtgccgcaaagaaatcgcggtagaccttttcgatgatggtatggctggaaatgttgacactcgggactgcccatcgagccgtagcctcgaagtccttctcgtgcgccgcaatgtaagacctcatgtcatttcgcagcccatccaccgtaccgatcgcacagagcagagagtgttgcgccgcctcaaagtccttgatggcacgatctttgtcggggccgtccgggtaaaggtcaatgacgcccttgcgcacgatcgctgccttagctttctcttccagatttgtttcggcggcaaagtagtccagcagcaaccgttctctttgccggtcagccggcgtccattccggctgggagtgcttcttcaggaacatagtaaaacctccaaaaatgttcaaaagttcagaaccccaaaatcgaattatcacttttgaggtgataaattctaaatttcgatgctcaaacgctcgtcaacaaacggggtatttgaaaatcgtcccttagaaggggaaggggtaatatcgctacgctcaaagtagtctaaaaagttgcaaaaatagccaatttgcaaaggggaagtttttgcagttaggccgctcgcttcgctcgcggatatacggagagttggtagcggcctaacccaaaaggtaggtgcggggtagacactttcgatttagtcatctacccatcccccagtatcttgagtcttctgccgactggcagcgtggacaccagagaaaatcaaatgtcccctaacaggtcgattgaaacatcgtggtaggctttcttctcttcctcgtctgcgattccgatatagcgcatggtgatgagagcactggaatgaccgaaaagacgctggaggaacacaatgtcgtggttgctctggtagtggaagtatccgaaagtcttccgcagggtatgggtaccgatgttctgcttgatcccgcaagccttagccgcatccttcaacttcttgcgcagggtgtccacttcaatgtgaccaccttcacgggaagcgaagatgtactcatcagagtagtggctggcatcgttaccgtagtaccactgaatggcatggacacatgattcattcagataaagtccacgtcgcttgtctaccttctcctgaaagactgagattttgtcggtggtatcggtgtagtctccgacaatgtagcggatcttgccgtcagggaagaaaatatcagaacactttagttccagaagctcgttggctctgaggccgaggttgattcccaggatgaatgccagcaggtatttgggatcagcattggcccgtagccaggaggccatagcgtcaagctgctcacgagacttgatcgggaaaaccgtctgctcttctcctttgcggtagttgaccttcttgggaggctcgacagcagaggtaccggggaactgaatgattttacagctggtcggcggtacggtattgatctgaggagccgtaggctgatcaaagagggtaagttgcgtgtccatagtccacctcattttctttgtcgcaaaagaccgtcagttgttgtctcttaccttaatatattctaccatatctgaggtctaaagtcaattaaaatattagttttctttgttgctatcggagaagaatacgactgtaaacggggtgaattatagagggttgacagaaaaaccgaggttgtaaggctaaaaatgtgattttggaggtacgggtttaattcatttactgttggggaatcgtcgagattgttcccgagtgaaaaatggggatatggggtgtacgtgatagagtagaggtactaagccgtttcgtgagaaacggggcgggcgcgaaaatgtgaaggctcccccggtgccggtggcgtccaggcaggcgggcggggtgccgttgttcgtctgctgacgggcgaaaacgggccggggttctgcaaactctccaaaagcagaattgacagagatagaaacgggcgggagtacgtcgggagactgggagcttcagccggtgcgggctggggtgtctgctggcctggggcggtgctgggctggccgtttgggggcggggttcggtctatatatgactttgacggcaaaacggcaggcaagcgggcgcaagtcctcatcttttcgcccttcctcccttcgtgttcttcttctccctcttcggatgtcctcgcggtttccggccggctctgtctgtttgatctgggcgggcaggttgacggcataggggcggcgtgtccgtctggccgtggcgctgggcgtgtcgtgctctcctgcggcatggggcagggctggccgctctcgtgccgtgtctgttgtccgtctcccctgctggccgtgctggggcagtctgtgcgggcgctggggctggcgctgggcatgggtggcgatctcaggccaagcggtttgctaatcggcaaaatgcacaaagattcaataagaaatgcagcataatgacgaaaataatgtcttgtattctgtgctttttacgctgtaaatatgcctgttttcgtgtaaaataggctgtttttctaactttttggatatagcaacaaagtaaatgattgacggatgggatcttttatgataagatatagacagttaaagagggcgggcgctggggccgttggccggggtatcctctccgggtggcaggctccaccgcttcccgatagcaacaaagtaaatcaacgtaaaggagacagaaacaatgaaaaagacttacaacatgagtgagaccatgacgcgggcatgggccatccgcaaagcggcggcggctgacatggggtgcaaggtgtctgaagtcctgatgggcgaatgtctgaagatcgcctgggctgaagctgaaggcgcaaacgctgagaccaacgccgccgccatcgcaggcgagtgggcgaacatggccgacgctgacaaagtgcgaatgatgaccgcttgcatccgcaaggccgcaaagaatgaaatcggctattccaccgaagaccattacctgcagttctctgaagtgcccgcgttcggttgcttccgtgtccatgattttgatgagtttgtatctgagacctgtattcgggttcttgacaagctggccgaccttgacaagctggccgcaacaaatgaacggcgggccgctcagggtaaacgcccgatgcgcctggtgtccgtcgtctacaatgcggcgcgggctgccattgcagcggtgtactacgccgacagcaaacacggcgcggcgtatgactgggaaatcaatgacggcgagggcaacgcggcgagcttccttgaaacctgctgcggagatgctacggtgaacaccgaaacaagcgccatcatccgggcagacctggacgcgttccgggatgggctggacgagatcgggcggcagattctggaaatggtagccgcgcacaagacagagcgcgagatcgggaaagccgtgggcatctctaacgtggccgtacacaagcgcattgtcaagatgcgggcggcgctggaaagtctgcgggttgcctgaaaagaaatttttccgaacggttagcaacaaagaaaatcaatctgtaaatgatagcggggccggcaaaacggaacgccggcccccaacaaaaaaacgtaaaggggaactcaaaaatgactatcaataacgcggttctgaaaaattgcttgaagctctccagcaagatcacggtttacgtacccgcaacaaacggcattgaccaggcggcggacaatacggaacaggtcaagaaaacggcggcgctcctctccgagcttttcggcggcgcgacttccaccccggcgctgggctactggatgtctccggctgctggcctggtggcagaggctacaacggtagttttcgcctacgctgcggatgcggcgctccaggagcacgtcgggcgcgtggtggagctgtgcgaggagctgaagcgggagatgggacaagaggccatcgccctggaaatcaacggcgagatgtatttcatctaacagcaggacggcgggcgagggctacggctcccgcccgcttttctgttttttcgggccgtgcaagaaaatttttcgggacggttagcagatcgggtgcggcgtctgtaattataacagagggacacaaaacgacgtaaaggagcgaaacaaaatgatgaccaaacagcaggagcgcgaggcgctgaaacggattaaaaacatcctggtagatgctggggctgatagctatatcggcatggcctttgccggttgcgtggaagacgcggaatcgaacattgaaaacgactgggcgctcagtatggcgggccgctggcagagtgcggaacagaagctggaggcggtcaagaccgaggcggacggactgcgggcggaacgggaggcaatgcgggagaagctggacaggtgcaacgcacggattgcggagctgacagaagaagcgcatactttgaccgactggagatcggaagaacgcgccgcgctggaacgtgcccagagccgcgccgatgctgcggaggccgagatcatccgcctgaaggcgaagctgtacgacttcatgacggcggcgaaggattgagaaacgcgggccaagtgcccgcttttcttttttttctggaacagttagcaaaagagaacgacgggagttttcccgccgtctttttgtcttcagttaaaggccataacaaccaggaagccgaacgcgatcactgcgccgatggtaacaagtggatgatttttcaacatgaacgggaaaaacggaacgtgttcataacgggatacggcgttatagtgctggatggcctggtatccggcgacgatcactgcaagaatgacaaatacccacatataatcacctaaaaatattttttggaacggttagcaagtccataatttcttctgtaattatatcaaataatggaaatcgacgcaatgtttattttggaacggaggaaagcaaatggatattcagaaaatcaaccagagttcgccggagttcctgtatcagatgctgggacggctggaagcggattgtctgtattatctgggaaacggtgggcgctttgcgggccatctctgggcaggcaatgagcgcgagcagatcaaactgatgcggatgatttaccgtcgcttgtgtgagattggagccgcgccggaatggatgagtgagcagcagatcaacgactttgcggagcagatgctggtggtataaaagttttttggtggttagcaaatttccgttttttgtctgtaaatataacaggaggtgttgaaaatgctggatgcagcaggattggaaaagtggattgccgagaacggtacgggcaacaaggaaagaaaatacataaacgggattgattatcttttcgtgactatgaatgatggatggattgccatttttgagtattcagaaggatattatatcccgaagacgcaggcggcggacgaggcgcacgcgctgagctggtgtggaatgatcgagcgcccgcgtgttccgttcaacatgatatgaagcagaggcgggagatccccgcctctttctttttttttgggaacggttagcaaatacgaatttcattctgtaattatagtagatacctggaaatcaaatgaaaataacggaggctgacaaacatgaagtggttcaataatcctgagacgctggaagacctgaaaaagcaatacaagaagctggcttttcaaaatcatcctgaccggggcggcaaaacttcggatatgcaggagatcaacgctgagtatgaagcgctgttctcccggctgaaggatacccacaaaaacgcagagggcgagttttacacggcacggacggccacgaccgagacggccacggagttcatggacatcatcgaaaagctgattcacatggagggcatcgagatcgaggtatgcggttcctgggtgtgggtcactggcgacaccaggccgcacaaggaagagctgaaagccctgtctttccggtggagcagcaacaaatccgcgtggtatttccaccgcgacggatacaagaagcggagcaagaagtctctgacgctggacgagatcagaggctactacggaagcgagaagatcgaaaaagaggacggcggaaaaatcgcggttgcataacagatcggcgggctgggaaaacctggcccgccttttctttttcggaaaattttactgaatggttagcaaatgattggaacagtctgtaattatagtgggaggtggtcaagtccattgaagtgctactacttgggcgataagaaaatcaccgaagcggaggccaaagagatcgaggccaaaaaccgcgagattttaagagatggaacagttgaggagcttttgcaaattcggcacgttatttgtcgggaggaatgaaagatggaacacacatttaagatcgaaaaggaattgaagatcacgacggagaacatcgtggactgtgtactgtcctgcgaggccggtggctttgactactggggcgagttgtgcagcgatgagaaggactacgaggcggcgcggcagcggctggcggagagagaaaaggccgatatgaagccctgctatgaggacgtgctggccgagattctggagagtggcggcaagctgaccgtgtatgaccgtgaggacgacaaagaccacgagctgacgctggaaaaacttctgaacggctggaaaaagtacgcggaagatcataacgcggacgacttcgacgagtacgacggaatttctgctgactgcattttgcagtatgcgattttcggcgacgtaatttacggctgataaaaacgggctggtctggtggctggcccgttattttttttgccggttaggttagcaggattgaaaaaccgtctgtaaatatagtgtaaggggcaatgttcctaagcgacaaagtaaattaacggaggtcgaaagaatgaaacgctatgcagtttgtatcactgatgatgacggcggcacgggcgaagcggtttttaccgtgaagaataaaacagaggcacgggccagaggtcgcctttatatccgtcagtggcaactccccaacgggaagatcgagtatatccgggagttggcagagggtgaagaggccgtcaagtttggccgcgccgctggctattgataggaggagatcatcatgtatgatgtcgaaaagttggtttccatcgtctgcgattatctggacgccgaagcggactatatgaaatacagtctggacacaagaaaagagctggggctggctcccaactctaccctatggattccttccctgaatggctccaaggcataccgcctgggcgagctgtttgaaaagtcaggagcgaccgggagcattttggccgacatctgcgccatgctggacatcaatcaggaattgctggtggccgctgtcaaatccatgcaacgcaaggaacgccataacggacgctgggacaatccgaattatacctgctggatgaacgaggacgacaaaaagcggctggcccggttcctttccaatgagcgcggagagtccggcgtttatccctggttcagcagtaccggacggaaaaagccatggtgtgaataaggtatagctaaaccgaagaggaagggcaaaaagtccttcctctttttttatttcatggttagcaaatttgcctttctttctgtaactaaagtagaaagtcaaaataatggaggaatgacacatgacaacgaaaactgattttcacgccatccaggagctgagggagaaatacgccccgaaagtgcggggtatcgtctccggcgaggaggccaaggccatctacgaagtgctggaaattgataagcgcaacaacatcgagcttcagaatatccgggatatggtggtcatgatctacggtcagtggtttgataaatcacgtgaccagtatctggaggataagaagaatggcgtgcaggcggttgataagtctgcggagtatctggacgcaatgagcgccatcatctgcgtcatcgactatgagaaattcaagagaggaatgggagtataaaaatttggggagggcggttagcaaatcgttctccccttctgtaattataccaggaggtgcagtgatggaaaacaaatacgtttccttcgaggtttaccgccccgtaaagtctcccatggagaaaggggaatacatgggaaagacaccaaacttggagcaggcacggcgggccgctgatgctgttggcggtgccctgtacgggataacatctgacggacgcaaagtcctattgctgtaagggaggcacaaaatgcaggcgtttacgaaaattgaaatcaagtggataatcgacaagctggaagcagaaataaagcagttgaaatccctgagcacagtagaaactggggccgcacgttccctgtatatcctgcgggccgaacaactggacgttatctctggcaagctccgtgtagctatcgaagccggagacaagcgcattgagatcaaatattaaggaggaagacaaaatggcacaatgcacgagagagcaggttaatcgctggaacgcaaaactgagcaacgggtttcggctcgatctggagcgcttcatcatctggaatgacaaggtggctacgcgctccatcgaattgccggacggcaaagtgctgaaggctgacatcggatggactgaggtgcgcgaggagccgagattgggctgtttctatcagaagactatcggcatgatgccgcgcctttccctttccctgtggactccgagcagcacgccgggtatgtggtgcagccgtggcctgggtgccgtggtaaaaatcaccgacaacatctaccagaaacgcaactggaacgagctggcaaagttcaccgctgaatgggacgaaaagcgcctgctggaagaggccaaaaagcatatggccgagcttcagaatgatgtggtagcctaaaaaaggcggagggatttttctctccgtcttttttcttttttggttagcaacaaagtaaatcattctgtaaatataataggaggcgataaaaaaatgagacaagcacaaatgacaagaaatgaacggcggtattaccgcaagaagataatcgagcagcggctgatggggctgggagttctggcctgctgcgctctggtgctgtggatgtgctccaccggtgtaaccgtagaagatcgagacggcacggcggttgtactgttggctccgctggggctgtggttgctgttctctaagcagattctgatttactgaggagatgccaagatgagcgagagaattttcaatgtttcccggtctacgaaaaccggtaagacggtcaatgttggcgactgctctataccatcttaaagctgtggcagaaaatccttataacagcgactatcatcgtgtgctattcaatgtgttgctggtcatcacggggtttgagtgtttctaaatcagggagagggtcgtccctctccttttttatttttatggttagcaatttttcaaaacggtctgtaaatatagtggaggtgctgaatatgaaaacctgcaaaatctgcggatgttctttcgatgaagaaaattttgaaggtgttgttgtcaatgaaggcatagacaatgaataccatgtttgttgcgattgtgtcccgtccgagtgtaacaacggacatattatttcctgtgaagcctgcggttcatatttttcggcggataaactgcacgacgaagagatcgaggggcattcctttaccgcgtgtccggcctgcgggaaagatgtggtagaggggttgagccgtgcagaatttgaagatgaatactttcgcccgcgatattctgttgtcgttcgtcaattcagcggttcagttcgtggatatatcgtgagcgcaaatggtcgccacgaggtcatgaagcggctgctggaaaagctggacttcaactatgtcgcagaggtatccattggggaaatccttgtgaaggaggacgagttttaatgtacatgaacaaaaagaagttcgatgagatcagggccaagcatagcaccaccattgtggtggatgctgatgtgggcgaggctctggcttttgtccaggacttgctggaggctgaggcggacgcaatcaaaaaccgcgagccgcacgcaactgcatctatcggacgcctgaatgaagccgcctatgaagtgttctccatctccaacgagatcgacgccgaggaatttgatgacggcaaataaaaaagtagcctcccggttagcaaaactgggaggctatctgtaattatagtacaagcacaagcaaccaactttaaggaggataacaaaatgagcgctgctaatttctgtaccatgagggacttccctttgttcgccaaggactactatgaggacgccaagcgctgcccggaatgcggcgcaatcctgagcgcagacgatacggaatgtgagttctgcgagtgtaacgagctggaagactaccagtattatgatgagtgtgcggcctacgacgagcgccaggagatcgaggacgaactgctggacttcaatcgtggcctgctgttccatgaagttaagctccaaagcggatactattctggtgtccaattctatgtggaaatcaatcacgatctgaccgaagatcaggattattccaacgatgactgccattactattttgactgctgtcggagtgtagcctatcggaagtatgcgtcggaagttcggaagatcaaccggaagctggccgagtttgccaaggcatatggattccaggaatatgtgtgtactgccagattttcaaacggtgaggcgtggtatcagcttgcctctaatcctcgtgcccgcttgaaatctgtcgtggcctaatagattgcccgccgtaaaaacggcgggctttttattttagaggttagcaaaactcgccctggctctgtaattatagtgaagcaattctaaacaactttttgaaaggacttgaagagatgaacaacgccaacgagcagaagacctatgtatgcaagcgggccagaatgtgcagtttcttgattgagaagggtttcaccccttacaaggtagctcccgaccgggacaatcccatgtacgatgtctttcttttcaccgcatcccccaagctgtatgaggctgtgatggaatatatcaataaccgtgctgagaggagagctaacaaatgatgaaggtttttgtgctgataaacgagcaggataccgacgcgagcaatcagtccaccgtccagctgtttctggataaggaagcagcgcgggccgagatgcgcaagcagtttaaggccgagcttccatcctggaatgttgatgctgaaaacctgaccgacgaccaggaatgcgagtgtggcgaggataccgcagttatccgcaatgatcccgattctaccaactggcggattgaggagaaggagctggatgtgcaggtggccgttcgtgttgctggtggcttggtacaagaggttcattctaacgctgatgtgggcgttgatgtgtatgatctggatgtttccgacttcccggacgaaggggaacaggaagcggcagaccagaaagaggacgtgctggatgaactggtcaagtctcccggctggcgtgctgtttggtaagaaaccattttttataaggaggaacatatgagcattacttatgatgtgtccaagcagaagggcagttcccgctggtacccccacaagattgagactcccaaggtgcctgctggcccgttgggagataagaagcaggcgcttcatgccgccgccgagttgatgggggtgagttaccccgagtacatggagttgaggaggaagaaaggatgcgcgtaaactacacccctgaagagatcgcagagatgcacgatcgtaacgaaaacttcaacggaacacgtgctaacttttccaagatcaagctctaccaggccgtcaaaaacgacctggtggagtttatgaatatgtgcgatgacgtgcggatgatcgacgggtatgacccgaacatgaaagagaagcacgccattctctggctggacttctcccctgccgctactctgaacaaggaagaaacagtggctctcacggccatcatgaacaaggccgacggcacggtgatttctgccgttgatgggcacgtccgcatttcctttgatatcaacgatatctgggataattaaacagacggttagcaaaacgcagttcttttctgtaagtataatgaccgaagaaaaaaacaaacgagaacaaaatttaggaggtacgtaaaaatgtctgcgaatgttgagagtatgttctatgctggacgcgagaaaccctggcatggcctgggtactcaggttgaggaagcgccgaccagtgccgatgcacttcggctggctggtctggactggactgtgcagcgcaagcccattcaggtttgcggcgggcgcaaggtggataacttcttcgctaatgtgcggagcagcgacggtgcggtgctgggcgtggtcagtgaccggtatcaggtggtgcagaatgcggaggcatttgcgttcaccgacgctctgattggcggagagggtcaggttcactatgagacggcgggaagccttatgggtggccggaagatttggctgctggcaaaactgcccgatacggagatcgtcggcgataagaccgagccgtatctgtgcttctccaacacccacgacggcagcggcgctatccgcgtgtgtatgacgcctatccgggtggtttgcaacaacactctgaacatcgcactgaacggcgcaaagcgtgcgtggtctgtccggcataccggcgacattcaggccaagctccaggaggcgcggatgtgtctggacatggcgaataagtacatggacaagctggctgtgtacgccgaccagatggcgaacaagaccgtcaccgatgagcagatcgccaaaattctggacgagatgtttccggccacggaggatatgagcgagcgtgaaaagcggaacgcgacgaaagcccgtgaagagtacatgatctgctattttgcgccggacattctcaagttcaaggggactgcctggggcgcactgaacgcgatgagcgacatggttggacataccgctccccgccgcatgacctccaactaccaggagaacaactggggccgaatcatggatggccatgccatgatggacaagatggcctctctgctggcaggcgttggcgcacgataagaacagaacgagacgggatggagaaatctatcccgtctcttttttttggttagcaaaattacagaacgatttgtaaatacagtgtggaggtgagtatatgaaacgcataagccaaaagcgacggctgatggtcgttaaatatcagaaccagagagatgttgaccggctggatacctgtttgaaaatgtgctgtctccctcatgtaattttcaaagagtatgaatttgtcggtggcggcgctctttggaaaatctacattgatcgtgggagcctcacttgggagcaggttatggccgaggtcaatagagtccatgctaccaaattcgagttcattaacgatggctcatatattcaagacgggaggctctatactcccttagttattcaaaagtgaggtgtgtttatgttgcggcctggacgttacaaatccgagcatgatggcaatgtttttcaagcctatcggtatgtcatggaagtcaaggaaaccgcgaagtcctatatcttcaagctgctggaagttgagaaccgatacgccgacgatcatatcgaaatcatgtttggcggcaagaagcggattgttcttcccaaggataagccttgccgtcatgcaatgcgagtgtggagcgaccacgacttcacgatttatcccttccaagccggcgttccgttttactttgagaaggaggatgtggcatgaaaatccccaagtatgtttatgagctggtggagctggggcggttacgtcccgctcctttggatgagcaggccaattcgagtattgcaggccagggtgagtatggatatatgttccgagtctatcggaagagtaacagtcaatccggcggagtgtttgttgccgaggtggaacgtataacagcctgggcgcgacgggagtacgcggaatccaacattcatacataccgctggtacactgataaagagcaccgtaaaccttactacaaacgggattatgcactggtgacgatcactgatccagtcgcacagcagctggaaaagttgattgctttggttagcaagaaacactaacggtctgtaaatatagtgaggaggtggtcaatgtgtttcgagttatcatcgccggagggcgagactttgatgactaccagcttttgaaagcgaccatggataaactgctttgcaatattacggatgagatcaccgttttttgtggacaggccaagggcgctgatacgctgggtgaacagtatgccatggaaaagggatacgccattgactattaccccgcccagtggaaatcatacggcaagcgagctggatacctacgcaatgagcagatggcacagaacgccgacgctctggccgcattctggaacggtgaaagtcgtggcaccaagcacatgatcgagcttgccaagaggtacggtttgaaagtgcgggtcaagcgatattaaggagacagagatatgttagtcattaagaaaatatgcgattacacaattccgatatttgggaacaagagagttctcccctatgcaaagctacttgtttctgatggtattacagaaaagttaaggccgatcatagatgatggcggaagacagtacatcacgttcaaccgaaagagatactacatcaagaatgctgggagcctctattctccccactatgtttttgccgatgaacggaacccctgattggatagcccgagtggaaccgttaagatttgagtataaggaggtagcagtatgaagattacggttgctgtcataaccccacaggattacgaaaaattcaatgccgtcggaatgaacgccgaggcgtgtctggcagaccgtgtaaagctgatatgccaggatgacgccggacacgtggcagagtccttcatgaaacaggatgagttcgaccggctggggctggcctatatcgaacagcacgcaaagctggagcactctgcggtctgcgatgagtggtttatgaagtgttctcaaaattcctggtacaacgatctggaacacaatcctgagaaagtcatcaaggttatgtttgtcggcatcgaagacggaacaggccgagaggtttatcggggtgccgagacacagcgttactatctgcgtgaggtacacgcccgccagctttttgccaagtggtatgtgtgtggagagcgccgggtatgggaagatggtagagagccaagacccaacctggttttccagctgggagatcagacggagaaggttgtatatgacgactggaacggcgttgctgcctacaaggatcagttcaacaaaaactttcgggcggaaggttagcaaataacagctttatttacgtaattagaataaccaaaaatataggaggtattaaaaaatggggactcggaatttgacagcggtttacctggacgggcagtataaggtggcacagtacggtcagtgggacggctacccggaaggtcagggcataacggtactcaccttccttcgggacaagatggatctggaactgtttaaggaagcgttgcggaactcgtcctacatccccagtgaggagcttactgctctctggaagcaatacggggcagacgaaaacggattggtcacgatggaagactcggataggatgatggaagatcatcctgagtttagccgtaacactggtgcgggcatccttgaaatggtgcagaaccactcagagggcatgaagctccaggacagcatcaattttgccgctgacggtcttttctgtgagtgggcgtgggtgattgacctggatgcgggaacatttgaggggtactgcgggttcggccagacccctttggccgagaatgaccgcttctacttcctgcgggatttggaggaggataacgggtatcacggtgtccggctggtagcaaagtggaacctggacgcgcttccgaccgatgaggaatttcttgccgcattcaaaaatgatgaggaggaaacgcctacgttttaatggttagcaaatagtagtttcattctgaaaatgtagtggtctgggaggctccactataaaaagcctcaccccataaagtgaggtgggctgatatggaaatcctctttgggcttgtcatcgtggccgtgaagttgattttggaacacgtggccgtgaggcacgccaacaaatactccgataccgttgttcgtagatacaacaaaaatgaaagtgaggaagaaagatgagtttgatggagaagttctccgccgtcgagatcaaggcggacaacagaatttccgaggatgacaaggtgttttgtctccgccagcaggaagcctttgataaggctgggccggcgctccagaaggttgctgaggcgatggccgcagccaaggcagagcaggctggaatcctgaccgcaaacgaagactttatcgaccggtatgtgggcggtgattgcgacgtagatggtgtttacgacaccatgaagaagaggaaccgcacattcatttcagctgtcgtcaattatttcagccgcaagtacagtgttgagctggacaagcacgagattgaggagcatcttattcccaccggcccgaaggagccgaatttgccctggggtggatacagaagcatgagcgaagacgagattgcctcttatcagcaggagctggacgcctataaggtcgaaaaggataagtttgaacagtccttgcgtactctccctctccggtatgaacaggtcgtggatgagatctttgtgcaactgggcggattctcatttcaggagcgagccatgaatgaatttctccggttgtgctgggatgcatctcatcacagaaactggagttccgatcagtatgtggaaaagttcgagatcaagaacgatgtgctccgcctgaccggatcgtgggtatattgtgatgaaaacaaatggatgagcagtcctgtccctgagtataagcccagtgagtccctgaaaaccattctgaatgcgctggcacactatgagactgggaagttcaaggacggcgcaaattggttcccggagcttttcaagtacgataccaaggaaaaccagtttgagatcgcgtacatgagcaaggtaaaaaatatcaagctgttcaaaaatggccgtgtggatatcaagttccgcagtgccgcttttgtccaggagtttgtgggacaatatttgaggagggacccggcatgaaactgacaaagaagcagctctccgccctacaaaggattgtagggcgggagcagacccgatatgacgaaacccagtcggaggctctggctggtgttcatcccagcgagaagcattttgccataacagatggaactatggtggtgctgtttgcggaacagcccgagggaatccccgtaggtgatcggacggaaacgtatgataaatacgttcaggactatctcaaggacgcgaacgcttcgttggttgtttcgccgcccactgtggatgattgcaaaaagatcatccgtgagtggagggatatgaagaatttggggaagcccctcttcccgaagattaccgttaccaccgaggatgagaacggcgctcctatgacgagctatttcgacgcttatcgctatctggatatcttggaggctgtcgggccgtatcgtaacatctatatggggagcagcgacacaatgcggacgccgtacccgtgcctgctggtgtataagcggtgtggacgtgacgagcgagatagtgtcaactgggacgagccggcatttctgctgccgtgccgtccttgacaggaggaggatgttatgagttttgaagacgcacttgaaaagctcttgtctctgggcatctataaatgtctcgcagaacgagctttgagaactgtttgcaaaacaggaagaagcatggacgttatggtagggaacgagaattatcgtatcaatgcggtatattcgggtaagagacgcgaggatacgaaattctggggacttgctacaagcaactatactttcgatgtggggagagtttgacatgaccagacggaaagtgattttctggaacgatctgaatgacagctatatcgtttccgaggaatataacggcgacaaggctgaaatggaacgcttcggccttggagcctgtgaccatacttggcctgagtttatggaggctatgagcagtgtgagcaacatggcggacttcctcaaggtgatctcctacatcactgccagttaccatgctactgtcaatggcgtgcctctcccggagcaggccaataacctgcctgggtcacggctgaatgtcgctcatagccataaggagctgtataacttagttggcggcatggatgaggtgtgggaggtcaagcggaatatccctggcgctcatctgctggacgtgtccaccatcgctcccaagcccaagcaggtctgggacggaaaggaagtcatagatgaggatgacttcgactacgccaccgcaaagcccggtgactttgtgactcaggccgtagtggacaatgcaatggattgtctgccacctgtttgtatgagtgcccggtgctctcagatgggcgagccgtactccagcaagctggatgaaaagaccggcgaatggcggagcatctatgccaccttccgtaaggtcggtggagagtggccgaatggtatttgggaatactgcggtcactgcttccggggtgaaacggtggaacggggcaaagaaatggctcatatccaaaatcttctcgctactattgagagatgaggttagcatccgtcgtctcccgtctgtaattaaggcgggaggcgaaaattttggaggtgttaattttgaaacggtttaaggtgaaaatcgcagacggccacactttgctgctctactatcccacccaagagaaagcccaggagagctacccggacgccacaattacggaacataccgaccaatctcatgtggggtacattgagcggatgcttgctgccgccaacgattgtaaaacggcggaacgcaaaggttctaccgtttatcttctcaggtttaacacgtcggcgggcatctgtttggcgatgcttttccgagatatcagcgacggaatgtggtacgacttgtgccagtatcaattctggaaatccggggcactggtcgctccaatcactaagaccctatctaatccagctgcgttttgtaaacagtttcttttcccgaagtcggaataccaagtgctttgtgctggcggcaagctcccaaagccggaagaaatcagaggcgttaggaaattcgcttctgtcccttttgagggaatatgtcagtgccagctattcctaaaaggtgacgacttatatatcaagcataacgactacttttcggaaacgcactccaccggaaagattgatccgcgcaccaacatggaggaacgggtgctatatatttgccacgcatggctgaggattaccaattttgtaccattggtaaaactcctgaacgacgtggaaatttctgccacagtttggcctatgcttcgggacttccaccaatggccggcaggtgaatataacatggagtggaaccgctttttggagggtgtagcgagggctacaagaaactatctgagcaaaaaggaggcaggttatggaacaaagaacctgtaatatcatcatgtgctgcaaagggcattgcaaactcgcgggcgaaaatgctccgccgttggaggccatcgctgcatacatgagcgctgagtgcgcttgtccgaaggaagactacaccgggaagctgatggaaacgattttgagagaggcgctgtttgattatatggcgggcgcggacaagcccggatatgagctgcgccagcttcttcagcaatatgccacacgtaatcccaatctttcggagcgtatctacaccctattccagttagcccaagtgagagatgataacaggtatgtcaatgggtttacggataaattgctccggcaaagtgagattgatcttggagcctccagagacagtatgccctgtcttttggatgaaaagaagatcgtcaattatccttgttctcgtgcctgcccgctttttggagactgcgttacaaagtggtatcaggtaagaaaaagagcctgaccggttagcaatcccccttttctttctgtaatagaagtgaggggcgcggttctgagaggactccgcacaaaagcctctctccagaaaaagaaagatagagcaggtgaaagaatgaagtatcaataccttaatgaaccgattccccaggaagcccgacaggagttgaacgacaagatcctctatttggtagaccaggatttggccgaacagtctgggatctcccgcgaggatatctataatgcctataccggagacggtggattgcatggcctgaaacgttctgactttgccaactatcatgagtatgcggaggccaagaaggagatcgagaacggtcagttctttacgcctcccgctctttgccagtttatcatggaggcgctgtcccctgctatggacgaaacggtagcagacctcacctctggcatcgccaacttctgtaacttcatgccgctggaggcaaacttctacggttgtgagttggacatcaagtcccacaaagtagcgcactatctttaccccgctgctaatctggaacaccgtgatatccgtttctatcagccgaatatgcggtttgactatgtagtgggcaaccctccgttcaatctgaaatgggagacggagggtggcgagatcatctctcagatgtactactgcctgaaagcggcgaagctgctgaagcctctgggcattatggtgattgtggtgccggcgtctttcctggccgacgaatatttggacggcgcgaaaatttccgaactggcaaaagatttctctttcctgggtcaggtctccattcagaaggatgcgttcaaatctcttggcgtggatagctacgctaccaagatactcttttggcagaagaagctggacgctgccgacaagggagaaccttatgctctgaacagcgccaactggttcaacctgaccgacatgaataacgcggcagagctgcttgagatcgtccgtaaggaagtcgttgccccggccagagagcggatgcggagcaacagtgcccgcgttaagctggcgtcgatgggtgggagcgacaatgcgttcgagtatgaagtgcggaagctgatgttccatatcaagtccaaccccaaactgatagacaaatatgccaagtgtcaggaatatctctacaagttccgccatcaggaacagcccaaggatatgaagtatgaggaatgggcaaaaatccgtattacggaagctaaggtactggcctatcttcgtcgtgttatcaagtctcagcataagcagcccagccaggatgtggtacgactggtcaagcgggatggagggctgatttacaaagggtacagcaaaaaggcacagaacagcatgagcgacggcatgaaacagctcgttcccttctatgcccttgcctctggacaagcggatgatacaggtcttgagcagtatgcccgccttattcgtcgtaagcagcgcgactatgagcgagagacgaaaccttttaccgagatggaacaggacgccgggatcgctcagttcctggacgactttaccgtttatgacaatgagaacgaggagtggattcacctcaataacacccagaagcacgacctgaacctcgttcttcagaagcgttatcatctgttacagtgggaacagggtggtggcaagacgctggccggcatctccacaggccggtatcggatggagcgtcagggcgctcgtaatgtgtgggtggtgtccactgctatctccatcaagaacaactgggatctggtgttcaaaaactatggcatgaccaactaccggatgataaagtgcctcgccgacctcgacaaagtacaggatggggagttcattatcatcaccctgaatatgcttaccaagtaccgtaagcagatcaagcgccatatcaaaatgcggaaccagaacgtgtgcttggtgttcgatgagtccgacgagatgaccaacccggatagcaagcgcacaaaggctgtgttggattgttttcggagagtacggtttaagctggaaatgaccggcactgtcacccggaacaacatctcggaatgtgcgcctcagcttgagctgctttataacaactcttacaatatgctctcctgggcagaagatttgtattgctatgagaaggatgactgtgaggaatatctgaactgttcaagtaatccttactacggccagcccttccctgcttataaagctggatacagtctgttcgctgaatcccatctgcctgagcggatcaccgttttcggagtgggtaagaaaacccaggacatttacaatgcggatgtcctgaacaagctcctctcttattcggtcatcacccggactttcgcggagatcaccggcaaagagatacgtagacttcatcaaaccccagtttcattcgctcctgcagagcgtgaagtctatcaaaaggccatggaagagtttttctccatgcgccagcggtacttcgcccttaccgggaatagccgcaaggatagcatgatggcgctgatccagcagattactttgttgctccgtatctctgctgcacccaacaccgtggaggaatacgacagcccgaatgcgccggtcaaaattcggaaggtttgtgacatggtgggcgaatggaaggatgagattgtagttattggtgtccgccataagaacgtggtggaagcatacgctaatgaaatccgcagaagattcccggatcggaaactgtttgtcgtgaccggctctactaccactctggccggacgtcggaagctgaaaaatactctgaaagaaagcggaaacggcattctcctttgtacccagcagtgcctcccctcctctgtcaactttgagttcgtcaacaaagttatcatcccggagctgcattacaacaatgcacgaatgagccagttctatatgcggtttgttcgctttacctctacggactggaaagacatctactttgttacttactctgggagcattgagtccaaccagatgcaaatggtgctcgccaaagagaaactgaaccttttcatgaaggggcaggacgtagatctggatgaggtgtatgaccgctttggcgtggattatgacctgatgagcctgctgatgtctcgtgaggcagacgaggacggaaacttcaaaatctcttggggagagcagaagatcagctaataataaaaccgccctccgaagagggcggttcatttaggccatgtacttactgcggaatatacgaagcattccgttttcccatgccgttttgacatggcctctgcaccattttgtgtatcggtcgaattgaagtgctgccgcttgattggacagcccgtatgttgccttgatctcagaagcggaacggatacccatttcacgcaggataggaagcggagcaagtaaattccaggcgaagtagtctgcctcgctctcgaactggtcatagaagcccctttgctcattgtaggcgatttcggctccctctatgacttccagatggcctatatagatatggccgatctcatgcgccaaagtccaccggatacggccagcgttcatttcagcattgtagagaataagataacggtttgtatctggatcgtagtgcgtcgctccagaattgcttttgcatagaacggcaacgtcttggacagtgcatccagtgacttcggccatttcctgatacgacaaaatgcgacagcttttggggatgcactgcaagagcaattcaggttggataggataggatacagaatccatgttctggtaaagctccaagaccttacgctgtacaaaaacactcctcactattttgccctcctttcgctacacggggacatcatgggtgcatattataacttattccgtgtccaataaaacggacttcttctgctgcggatcattctcatcggaaaaagcgtagtcaaatccgattttcagaatacccatcatgcggtttctatcctgctcagtcatgcgttctctggctcgctggagggtaatatagtcggggtcgccaagcatggtatcggcagtagagcgcacattagaagcgcctaccaggtagtcaatggagacatggaaatactcggcgatcttggagattttatcaatagttggagaagtagagcttttccaccttccaatggaatactggctcataccaagttcggattccagtttgttgattgtgatgttattttcagcacacaattctttaatccttgtaaaaatgacggagtccataacacaacctccaaacagagaatttgaatgtcacgatttttttcgtgtaaagcacttgacagcacgaaagtaagctggtatagtaaataccagacacgaacatattcgtgaatttaagtatatcatatcacacgttttcagtttagtcaacctaatacttatttggaggcgcgtaaaaatgcacatcgtaaacagtatggcagcaaacttcggcaaatatgatttggatgtcagcgccgtggggatgcggagtatcagcgagacggacattaagctcccgtacactggtgtcctccccgtacagatgtcagcgtcctctggtgcctatgtctacctcaacgtccagctggctcaaggcgcacgcctggttctggttgcgcatgggaagggcaaggatatcaagcgtcctctcgaagcgtccagtgaagagattatcgctttgctggatgggtttttcaagcaaaaccaagacgctaccggccttgctcaatattggctcggtgtgtggcaaactcattatacggaatggagaaagatcgtgaccggcccggatcggctgttgacaatcctctcttccctgtccgtaacggatcgtgagttcctgtgtaagcatatgatggacgtgccggcgacagagtgaggtgaagcggatgtccccgaaaaatttcgcaaataattttcttgtttgctattgacaatctcagctacgtatggtaagatagcaacatagaaaatgatttgaacggattggagaggggaatatgatccgtaacaaattctttgaagacccggacggcggctatgctaaggtaggcgtcaagaaaaactttgatatcgcctggaaaaaggttctggcctatgaagagcagacaggccaatcgctggacaatggctttactaaggaacagtatgtgtccatgttcaactccatgagggttcgtcacaccagcattttcttcaactataaaagccatgtgatgagctatgtgcgatacctgattgccaatggcgtgctgccggcagaacaggaaagcattttggcctccgtcactgtggacgacctgaaaatcaacgagaccagcggagtgcaatactacaagaacttgggtatgctccaccaggcaatccaggattccatcaaagtgtccgagtgctacgatgaaaccttgtttgacctgcccgctgtaattctttacctggcttggtttggattgaccgaagagcagatcatcaatttccccaaggaagatgtgcttgatgacggcgtgatgataaacggtgagaagaccgagatgccgtttgaaatcttgcagatattcaagcgtctgagggatgcagagggatactaccagcaggccagaggcgtaatcttccgtgcctatgtctattcagataacctaattcggacggagcggaacagcaagatcaacgtctctaagatgcagggtctggtaaatcgtctgaataccctgatggacggtacctactcgctacggtacaacgtaatacaccagtctggtatattctaccgtgctcatctgctggaatgcgagagcacccagttcaatctggaagacccggagtttgcgtctaaggtgttctgcgaggatctgtccagcaaggtcaagcacacagcccggatcagagactacaagctctacaagcaactattctactaaatggcttcggccatttagttcttggatagcaacaaagaaaattattctgtaagaggagtgaaagcaatgagatcccgtaaaaacgccgtccccgtacctgtcacccgcgatctcctgcaggaaaagcagactgaggttgctcgtctggctcgtcaggcaagtgaggcggtagacatcgttaccagaacaatgaatgagctggagggtatcaaccagcagatcgacaacgacctggctgagatcgacacctattccaaggaactggccgcgacacgcgccgccatgtcccagcagcggaagaacaataccactatcatcgccaacttcgcaaagctcctggataccagtcccgcagagagcgtgagtgagtaattcattcggttgaccaaccggagcatgaggcgctaacagcaattttacaactatcaaacttttactttgactcaatgcgtctcgttgaaaagcacggaggggtaatcctaactggtaaggaagcagtttgctaaactgttagtaatccgaaagggtgtgtgggttcgagtcccatcccctccgccaagccgcaatagcggcgaactctttatcacctcctctctctgacggcgggaaagaccgctgacggcccggaaagacgggcgacatgggagcgtccggcggcagctcataacgtgtaatcgacggtggacacgcacagcaattttaccttgaaagtctgcaaaacttttgcttacggttcgactccgtagctcctaaaaaaccgtcatcaatctataagaagggtcgtgtgtgtcatgaagaagttcctggctatcgttctgtgattcaaagtgatcagcggcagcggcgtccagcgccgggtatgtggaggaagccatgaatagaatacgagacaagccctaagtcatcttcggatgacagtatagtgatgaatgcgacgatgaatgaacagtaacgaattggggcactaacagcaaccatcaacattacctgctttggaaatgagaatgtgtcccgcacacgtggcaaagagccattttacggatatagcggtttctgggaggtttccgtattcgtatgcgtacagagcaacgcagacagcaatgaaaaagcctcccgccatgcaaggatagctcagttggtagagcaccagtataaaaaatgcgtaacgttcccctcccccagttacgctaacagctatgtaaaaagggaactgattgtcgtgggttcgagtcccactccttgcaacaagctacttagtgtagccacaaaaaaggaggtgcaacagactaatgttgaatatgggtttgcttgtctgttgttccttgccgtatgtcattatctcgaccccgataatttacagtacggtgaaaacctggttcgccgccagccataatagtgcgggaagccgaaccgatcggtataactgtttgccgtattatacggctgggtttgagtagaaaatgcacataagaggggtcatgcaaaatagccccgctacggcggggcgtacgccagggtagctcagtcggacagagcgcgtactaatgcgtgtcttgttgagacgcttacagcaacattctatggactgttaatcccgtggtcgtgggttcgagtcccacccctggcacaagcagaagccgcccctgctaatgggcggataggcatagggctttgggatcgtttatgtctatgctgacggtaaacgccagatattcaacccaaatatcttgaactgggttgtgacggctcggaaagacgagcttcatgcggcagtggtgaagtggtcaacacagcagccctattacaatgcgaaacgaggagttccgctaacagcaatgttcaaggaagccaagctgccattcgtaggttcgagtcctacctgccgctccatttctctgggcataaacagcaacagtaaataaaaagtgtgtcctgggtatctcaatataggaggtaagagataatgagtaactttatggatgggatcaagagtacgctgaataacgagtgcaatgtctctgtcaccgagaacggtgcagtcggcttccgcactaccggcaaggctctcctggatcttaatttcgctgtggcatctctccgtagcgccagcgagcacgacatctctcagcgcttcactaaggcgttcttcgaggacaagttgatggcaatgaaatggctcttttatgctcgtgatgtccgtggtggcctgggcgagcgccggctgttccgtgcctgcatggtgcctctggcgaaggagtttcccgagtacgtcgcccctgtggtggcactggtgcctgagtacggtcgttgggacgatctgtggtgtctgctggatacgcccgcgtgtgactgtgtgaccgggctggtcaaagggcagctttatgacgacacccaaaatgcggcagaggacaagcctatttctcttctggcaaagtggatgcctcgctgtaagacttcttccaagcagacccggcattatgcccagatcttgcggaaggctgtcggcatgaccgagcgccagtatcagcataccctcgccaatctctcccgttacctgcttgttgtggagcagcagatgaccgccaagcagtgggaggaaatcgactatcagcgtgttccctctcgtgccaacctgcagtacaacagcgctttcctccgtcacgacgaggatcgccgacgtgcattcctgggtgctgtggagaaaggcgaggccaagatcaacgcttctgttctcttcccgcatgacatcgtacatcggtacggttatgccgacagcaccgacaccaatctggaagtgctgtggaagaacctccccgatacggtgcagggctgtggtaacaccatcgtggtggccgacggttctggtagtatgagagtgagagtcggcaacactgatgtgtctgcgctggaagtagcaaactctctggcgatctacttcgccgagcgttcttctggtcagttcaaggatcagtacatcaccttctctgaacatcctcagctggtcgatttgagcagaggcaagaaccttcgtgagaaactgcggatcgcggctacccataacgaggttgccaacaccaacatcgaggctgtattcgacctgatcctcactacggcgatcaacaagcacatggatcagagcgatcttcccgcgaacatccttatcatctctgatatggagttcgatggttgtgcaaccaccggcgcaatctcccatgataggtggggatatggcagacgggtcgcacctactccccgcctgtttgaggtaatcgcccagcggtatgcggaagccggatatcagattcctcgtctggtattctggaatgtcaactcccgtagcggcaccattcctgttaaggagaacgatttgggtgttgcgttggtcagcggtttctctcccaatatcgccaagatggtgatgagcggccagactgatccttatgactgcctgttggaggccatcaacgcagagcggtatcagcaggtggacgatgcccttcgtcctattatctccgcataagcaacaaagtaaaccattaaggaggctcagaacgatagagtagcaagtagctgtctacgctctgagcctcttttatcaaaggagtgaaatacgtggtatatctcgacaatgctgccaacgctccggtcttcccggaggttctggaagctatgctcccttggctccggcccgatcatgtaggcaatcccggaagcctccatacccaaggggtcaatgctcgtgaagctgttgaaaatgcccgccgccaggtcgccaaaatgattggtgccgatccctcagaggtgttctttacctctggtggcacagagtcgaacaatgcgtggttgcaaaactttggcggcgacttgattttaacaactgctctggaacacgattcggttctggaacctatgtctgcgcactgtcatcgccattatatcaaagtccacaaagatggtagcgtagatctaaatgacctggaacgttttttatcggatgcccatactgctgagtctaactatttacctcgtgatggacgttcgacggctgtttctatcatgtgggtaaataatgagctgggcactgtcaatcctatgaaagaaatcggaaccctttgcaaaaggtatcatgccgtattccatgccgatgctgtgcaggcggcaggccatgtgaatatgaacgtgaaggactgcggaattgacttctgctctatgtccggtcataagttcggtgctcctctgggtgttggtgtgctttatatcagcaattctatccgtaaatccccgtggattatcggtggaggccaggaaaacggaatgcgtggtggtaccgagaacgttccgggaattgtaggaatcggcaaagcagcagaaatcgttactgaacgcctccagaactggaagctacggtggggattgctcagagatacattcttaactgatttggggctaagaatgcctggggagttctatatcaacggtgatagcgagaactattcttctaacatcatcagcctgaccatccctggcgtcaacagcgaatctctgcttcttctgttggatcagttggatatctacctttctgctggttctgcgtgcagcgctgccagtgctaaatcctctcacgttttgcgtggtattggaatgtctgatgaagatgcggcctgtactgtgcgtatttcaatggggttcaataccactgttaatgagatgcacgaagcggcagaggctatcgtgactgtctctcataagctgaaatccatgtattcttaattagtgacaaagtaaattaacgaggagtgaatataatgtactgtgcctatgttaccaggattcacaatctgaggaagcataccaatgccgaccggctgctctgtggcgaatgtttcggtaatacggtaattgtggatctcggcaccgaccctgatcagctgggcgtgtacttccctaccgatggcaaactcggtttggagttcgcacagaagaatgacttgctgcggcgcaaggatgagaacggcgctccggctggcggataccttgacccggagaagcggaatattaaggctctcaagctccggggcgagaagagcgacggtctgttcctccctctctcctgtttggcttcttttaccgatatcaagaagctccaagagggcgatacgatctctgtgttgaacggtatcactatctgcgagaagtacgtacccgccgtcaaacgcgcctccggtagtggggggggtggcaatcatgttcgtaagcgttctgatcctatctccccgctcttccaagaacacgctgacacggagcagttggcctacaacctctccgcattccatgccggagatctggtagaagttaccctgaaaatgcacggaacttctcagcgtaccggctatctgcctgtgttgcagggctataaatatcggaaccgcatggaaaagcggctctatgaaaaccgtaagaccccgaatgtgattcgttccaaaatcaagcgggcacccatctatgattggggctatgttaccggaacccgccgcgtggttctggataccttcgatgagggaggcttctacggtaataacgctttccgcgaaaaacacgccaacgtctttgaaggaaagctccacaagggagagacggtctactacgaggttgttggcttcactgacgatggtacgcccatcatgaatcccggaaacaactctaagctgaacgacaaggagtttaccaaacagtacggtaaaaccaccacattcagctatggctgcgctcccgatggtaaggaacatcccaagtccgatcttttcgtttaccgcatgacaatgaccaacgaagacggtgatgtggtggagtatccgcccgactttatgcgctatcgttgcgaacagatgggcgtcaaatatgttcctctgatgtatagggggcttattcccgaagaggaaatcttcacaggaacttcttgcgagctaaccaatgctggtgaatggattaaaaccaaagccgagcagtattatgacggccccgatcctgtcggtcatacccatgttcgggaaggtgtcgtgtgccgcattgtcaaccgtcccaagtttgccgcctataagcataaaaactttgcgttcaaggcgctggaagggctgatcaaagacaccgccgccgcgcctgatatggaagaagctcaggatgttggagaacagaatggatgaaaaagtcgttcttgactttatcaacaacttcaaagctgggcagatatggggcggttcgactcaagcctataccggagaatgatccgggattgtatcaaaaaggagcgatatgacgatgacgactttgatccagaatgagcagaagcgccagaagattatggcgcggatgcgggaacatctggtgcccgtcttggagcattgcaggggaggctgggttggcctcttcctgcaaggttctcagaattataaccttgactatgagggtagcgatattgacaccaaggcaatcatgttgcccagcttttccgatttcgtgttgaacgccaaacctctcagcactacccacattatggagaataacgaacacgtggatttcaaagacatccgcctcatgtttgactgtatcaagaagcagaatgtcaactttgttgagatcctgttcaccccttactccatcatcaacccggagtatgccgatcttttccagcctgttctggacgctcgtgaagagattgcccgatacaacaactacgccgggatgaactgcattatgggtatggctctggaaaagcaaaaggcaatggagcacccctaccctgccacaatggacaagattgaggcatttgggtatgacccaaagcagcttcaccatgctctgcggctgtgggagtttatgacccgttacgaagccggtgagccttacgctgactgtcttatcagtaaccagtgtgattatctcaaagaggtgaagcgcggttgctactctttgaaagaagcacgggcactgatgagcactgcaattcaatctatgaccgaagacaaaaagcgctatatggatacggtacctgtttcgatcaaccagcacgccaatgaggtactgcaaaaggctaccgttgaaattctcaaacgatccttcttaaaggaaatccaaggaggagaatgagatgccgatgttttacatgatggttggcctccctggtagcgggaagtcattcactgccgaaagcatccctaacgccgtcgtccactccagcgatgcgattcgtgccgaagttcttggtgatgagaacgaccaaacccaacaggacttggttttccaaacccttcacaaaagggttttgcgggatctggtggatggcaaggatgtggtgtacgacgcaaccaatatcaactacaagcgccgtatcggattccttgatcgtgtccgagcgctccacaaacatgatttgcgtacagtatgtcttttcatggcgacgccctatgaggtgtgtttggagcgcaacaataatcgggaacgttctgtcccggagtctgtaatccaaaagatgtacttcaaattcgatgttcccatgatggcagagggttgggatgaaatcaggatcgtgggtgacgaagatcgccacgaccagattgatacccttatgcttcgtctctccaagctggaacatgataacccgcaccatgagtacacggttggtcagcactctatgacggcatggcagtatctgatcagccactataaaggtgccgatgctgctctgctccgcgccacgctgttgcacgatattggcaaagaaaagactaaagtatttcatgacatcaaaggcaaccccactgagatcgcccacttctatcatcatgagcgtgtaggagcttatgacagcttctgctataccggcgatctcagtcctaaccagcgccttactgtggcgctgctgatccgctggcatatgtggccgtatgcggctgaaaagtcagataatccgagtaagacggttagcaaaatcaaacgtctgcttggtaatgatatctggaaccaggtcatggtgttgaacgcctgtgaccgcaatgcacactgaataggaggaaataactatgattcccgacatgatccacactccctacatcgctccccgcatctctgttatggcaccccccccggtaactgctgaacggttcgttgatgagcttctgagcggcctgtgtatgccggacggcggctttgttgcccatctcgctcccagcggagatcctttctccaacggttggaatgcggcaatgaagctccaagccggtcagcctgcttctcgccatctgccgatgcccgtcaatgtgatcttccacaacccggctaccatcgtgttctgggatgacggtgataagacggttgtgaaatgccagcccggtgatacattcagcgccgaagccggcctgactgctgccatgctgaagaagtacatgggcaacgacaatactttcaacaaggtcatcaacgagtggctggctcgtgccagctatgccggcgtccctgctctgccggaggccacagagtaaccaatggacggtatcatcctactgcttttggctctggtgctgatttatacggtaggattgggcggcgatgacgacaatcattggaaccggggaggtgggtgctttgcatagcagagaagagttggaagagatgcagcgcctgcctctccaacgcaaaatccagatcactactgctcgtatcatcgagtggtatcagcactacgatgggaaggtctatgtggcatttagcggtggtaaggattctaccgtactactcgatattgtgcggcggatctaccccgatgtgcctgctgttttctctgataccgggcttgagttcccggaagtcagagaatttgttaagagctgtgaaaacgttacgattgtccggcctgagatgaacttccgtaaagtcattgaggtgtacggatatcccgttgtctcgaagcgtgtagctgacactgtggaatatgggcataagccaggttctttcagatggaaagagctgcatggagagattgtgcggagcaacggaacgccgtcagagttcaactgtgaaaaatggtgttatctgttggatgccccattcaaggtttcttctcggtgttgtactgtcatgaagaagcggcctatgaagaaatactccaaggaaactggtcgagtacctattattgcaactatggcaaacgagagcagatctcggcgtgccacatggttgcgtatgggatgtaatgctttttccggtaagaagcccagctcccaacccatgtctttttggactgaggaagatgtgctggaatacctctatacctatcaagtcccctacgcttcagtttatggcgagatcgtcagaactgatggggggggtggacgacgacaggcgaaaagcgtactggctgtgtcttttgtgcctttggcgctcaccttgaaaaagctccaaaccgtttccagcgtctaaaaatcacgcacccaaagctctgggattactgcatgagaccgtgggaagaacatggtttgggtatgcagcaagtccttgagtatattggtattccggtagaataatacaaataaaaaaggagcgccttatgattgatgtaatggaaaacatcaaaaaactctccgccgctttggatgcggaaactgcaagcctacatccttccggcaagctgcttctgcttggttctcaggatagcgtgttcctgaaagccatcaagcgtaaggcagaccagcttggtatcaactgtgatcatacgtccaaccctctccctccctatcgagggattgttgtggatagtgaaacagtgtcgttcaactctattctcgatcctgatgtggatattgaccactcttattctcccggaatgtcggcggtctctcaagcaatcatggatttgctaattgagtctggattggtatgggagaaggatattaccatcgtaggccgagggcacgccgttaaagaactggcgaagtatctggactttaacaacgcgacggttacagtagcacattccaaaacaaaaagcctgttgcaagctacgcagaaccgggatgtggtgatttacgcaactccgattatcacgcaggatatttcctacaatacccgcgatctggttattgacctgggaaacagcgtcccgcatcctgaccggcttaattgcccctatgtaaatcggatcggacagcttaccgtaagtatattgctgaatcgttttgcaaagaaggagtcggtatggatctgaaattcaacacagtatattttacccaaaaacctattccgctgccccatgcaatttttaagggcggcgaaaataattcaaattcagaaaggagctaataccaatcccggtaagccgggtttctacaagattgataagtgtagagtaaagccgtctgttacagcgtgaaagccatctggccggtagcaagggaggattagacggttgacctcagccgagatggttgtggtcggtatgaagcacatcgtttgtttttctggcggtcactcctctgcgattgccgccgtagaagtagttagaaagttcggagcagaggacacgatcttgctcaatcatgatttgtgtcctcgaaccgaagacgctgatatcaagcgtttcaaaaaacaggtttcggattatctgggcgttcccattacttacgccaatatgcccggatgggatattaaggatcagttcgacgtgtgtatggaaatcaaggcgtttaaggctggcgctcagtccaccgccttttgcaccaacagactgaaaaccgaacctttccataaatggctgtccgagcactatcccgcaaatcctcccgaagtaagggacgatatctcattagtctatggctttgacgccaatgaacagcaccgtattcggcgcagagttggcattatggccgcgatggggtaccaaacagagtaccctttgacatgggaggtacgtactatccatgacatcgaggaggttgggatcgagcgtccgaagacctacagcattttcaatcatgcaaattgtaccgggtgtttgaaagccggcaaacaacattggtttgttgtttattgcctctatcctgaaatatgggaaaaggcgaagttggccgaaggcacaatcgggtacagtattctcaaacaaggctatctttcagactttgagacggaatttgccaagctcaaagaaaaggcgttgccgcccactgaaaaagccaaacctcaaacattttgggccgctgcacgaaagctcatcaaggacgacgatgatctaccgtgtgagtgctcattttaaggagttgtttaagatgaagattcttgtaatagtggatatgcaaaacgatttcatcaatggtgcgctcggaaccccggaggcgcaggctgctgttggagatgtcgccaaaaagatttccggctttgacggagacctgatttgcattaccaaggacacccatcgttctgccgactacctgaaaacccaagaaggtcagctgcttcctgtcgagcactgcattgaggggactcacggctggcggctcgacgatatcattgccacggccattagtcatgcggctatcgacgcggggaaaagcgtatccgtattccagaagggtacgtttggctctgtagagctgggcgattacctggtagaactttctgccagaatgaagcagcgtattgaagagatcgttttcgttggactctgcaccgacatctgcgttatctctaacgcactgctcgtcaaagcgtttctgcctgagacgaaaatcaccgttgacgctgcctgctgcgccggtgttaccccggtgagccacaacaatgctctggctgctatgaaagcgtgccagatcaatgtggagaactgggaggtctgaaatgatttttgttgacgatagaaggatcgacttcgccagttttcccgacggtacatcttcgattcgcattgctcccaagctggacttcacgtttttcgccatgggtaagtccgcttatttcatccggtggatgtacgacaatgatgccgagtgtatgcagctctggtatttggtgaagcacctcaagagtgctggcaacccgctcctctatctggagatgccgtatatccccaacgcccgtatggacagggtaaagaaccgcgatgaggtgttcacgctcaagtggtttgctgagtttatcaattcgcttgggttcgagtctgtcaaagttctcgaccctcactctaatgtggctatggcactgattgaccgggctgagactatggatgtgaagcattacatcgactatgcaattcagtggatggtcagtcagggtctgaatcctctgctgtgctacccggatgaaggtgctgccaaacgatactctgagcttcttcctatggagtatgttttttgcattaaacatcgtgactggcgcaccggcaagattgagcggctggagctgacagatcctgagaaagtcaacggcagaaatattctgatcgtggacgatatctgctctcgcggcgggacatttacccatactgccacggctctgaaagaagccggcgcagaggaagtcatgctctatgttacccactgtgagaatacgatcctgaaaggcactgtgctgacagatggtcttatctctcgtgtattcaccactgatagcatcctccgtgttgatcacgagaagatctccatttgtagatgattatgaaaagagggtaaaacaatgatttcatacagtcctttgctctgtttggacttctacaagactgcccatgcagagcagtaccccgcaacactgaccaagatggtgtcttattacaccccgcgcatgacacggctggctgataccgagaaggtcacaatgttcggtcttcaggcatttatccaggagtatttgatcgaggcattcaatactcacttctttgatcgctcattggatgaggtgcttgccgaatacaagcgggtgctgaataacaccatcgacacggacggcgttggtgtggagcgtttggcggcgcttcataagttggggtatctgcctctggaaatccgggccgtgccggaaggaacccgtaccaatattcatgttccacaaattgagatctcgaataccaaccccaactttgtgtggttggtcaactctatcgaaacaatgttgtcatgtaccatgtggcatactcagatttcagcggaagttggatatcgttaccggcagatcgtcaataagtacgctgcccttacctgtgatgatgatgtggtacgggccaagctgctgggcgacttttccatgcgtggtcaggaaagcgtggagagcgccaccaagagttctgctgcgttctgcctgagcttccttaatactgctacagtgccggctattctttggctggaacacaactacgcctgccgagtggagaatgacgcagtagcttatggtgctctttctactgagcacagtgttatgtgctccaactatgcggttgacggcgacgagattacacacgtgcggcgtctactgaaagaaatctatccgtaccaaaacttctctatggtcagtgacagctatgactattggaacctggtcaataatattctccccgcaattaaagaggatgtgatggagcaccatggatgtcttgctattcgcggcgacagcggcaaccccgtggagattgtaaccgagacggtgttcaaactgtgggaaatttttggtggtaccgtgaacagcaagggttacaaagttcttgatccacacgtcaaggcattgtatggcgatagcattaccccgcagcggtgcgaggcagtgtataagatcctgatggagcatggcttcgctatcaacaatgtttctctgggcgtcggttctttctctatgcagtgtctggagacgatggacggcggcgaaaagacttatgcgccgtacacccgtgatacatttggtatcgcagtcaaagcgacctatgcagaagatgctgacggaaagcccatcatgatttttaagaaccccaagacagatagtggacatttcaagaagtctcagcgcggctgctgtaaggttgtatatgactatacgtaccacaacttcttctgccaggacggtttgacttgggaggagtcgcagattgggaactggctgaagccagttttcaaggatggcaagctcctgagaatttataccctggatgaggttcgcaagaatcttcatgagggaaacttttgagaaaagaggtgccacaatgttagctaacccaaagcgtactaaggatgagattgtccagtggattcgttcctactttgaaagtaacggccaaggctgcgatgcggtggtcggtatttctggtggtaaagattccagcgttgttgccgctctttgcgtagaggcactgggcaaagagcgtgtagtgggtgttatgatgccgaatggagaacagcccgatctggacgatagcaagcagctgatcgaatttctgggtatcagatacgcctatactgatatctccaaagcagtgtctgcggtaagtgatcaagtagcgctcaatatgaacgtcagcgatcagacgaggataaacctccctccccgtatccgtatggcgaccctctatgctatttctcagtcgttgcctcacggcggacgtgttgctaatacctgcaaccgctctgaagactatgtgggatactctaccaagtttggcgatagcgccggcgattttagcccgctcgctaatctgatggtgcatgaagtcgtccagattgggtacgagcttcttctgcctatcaacctgataagcaagaccccttccgatgggctgtgtggaaaaactgatgaggataatcttggatttacttatgctcacctggatgcttacatcatgtatggcaccagtggaattgaggaaatcgacaagaggattgcctctatgcacgatcacaaccttcacaagctcaatcctatgcctgcctacggaacgacaattttttaataggcggtgagaaaatggaagagcgtacttatttgagcggcaccagtttggccggtatgtcccctacccgctctcgtgtggagaacgactactatgctactccgttcgaggcgacagaagccatccttagccgagaagagctgcacggctccattttggagcctgcggctggtgaagggcatatcagtaaggtgcttcgggaacattatcccaacagtcaaattatctctactgatctggttcagagagatgataggttcggatgtggtattgttggcggggtggatttcctcactgagaactatcccgaaaaattcaacaacgtcatcacgaaccctccgttctctttggcgaaagagttcgctgagaaagctctggaggtatccactggcaaggtgatcctgttcgccaagatccagtttctcgaaggacggcaacgtaaggatttctttgccacccaccctccgaaagccgtgtatgtattttcaaaacgtgtcaatcctttgagaaacggattggaagttgacgaaaatggtaagccctggtcaagtaccatgtgcttcgcttggttcgtatgggaacatggctataccggcgaaccttgcattcgttggatttaatttgcaacaaagtaaatcaagaggtgcagctatgaagatggataaggttgccggcagtggcaacgacgagttctatacaccggagtatgcgattgccccgttgtacaagtatcttccaccccccccgtgacaatttggtgtccgtttgacactgaggatagtctgtttgtaaagctctttcggcaacgcggctataccgttatcgcaacacatattgcaaacggtcaggattttttcgctattgacccaccgaagtgtgactacatcatcagtaatcctccgtattccctcaaaggcgaagtgtttgagcggctattccagttgaatataccctttgctatgttggtaggggtcgtcggacttttcgagagtcagaaacgctttaagatgttccgtgagcatgattttgaaatcatgtatctcaatcggcgtgtatcttactttaagaactacgccgaccaaaagccgtctctaaacccgcctttcagtagtgtctatgtatgcaaaggaatgttaccaaagcagattatctttgaagaaattcaaaaaacctcataatagcaacaaagaaaattattgactttatggagacagtatgatagaataaaagcagttcgagggagattgtaaatccctcaaccttccgtttagcaacaaagaaaaccaacaaaggaggaactaatttggattaccaaactgcccttttctgcgagttcgatcgttacgccgcagaaagctattgcgccgttcatggtgttgatcccacccttaacatcggagatattaccaaagccgatgagaaggctgtgccggatttcaatgtcatgttcggtggaagtccgtgtcaggattatgccgaggaaatagttattccgaagtcattgcatagagtcttgtaaaacaaggattctccgtaaaaacttcggaataacaaagcgggcctcattttatataatgtggacatgcagacaaccgtctgacaccacaaaatataaggagggcctatggaactgattgaattagacgcaactgcacagcgtgccctggagttgttaaccaatgcggggatgagtgnggcctcattttatataatgtggacatgcagacaaccgtctgacaccacaaaatataaggagggcctatggaactgattgaattagacgcaactgcacagcgtgccctggagttgttaaccaatgcggggatgagtgctggaagcatatacgactatactcatacaggctttggcagcatacttcgacattttcacacaaaaggcatactatatgctacagcagaaatgctcgataattttttgctggagcaacgcgtgcttttggaccaaggagatatctcacaatggaaatggggacttgtccgcaggagttgtgagcttctgaaacaatgtgctgcaatgaattctattgatttgcctgaccttcagccatgggaccctgtatggaatcgtccaaagcaaatcatccaacacgacgcaccgacggcgaaacagtttgccgaatcggaaaatatttatgtgcttgtctggatggtcaacaagcgtatggaacaacttggcctttcggaaaatacggttcgccattacacggaagagggattagccgtcattttgaaaaagcactatgattctggtacagaaagttactcagacaaacttatatcccagcttacagatgagcgaagactgcaatatgagcaaggggaggttggcagaactacttatcagaatttgcgcaaagcggcggcgatgctccaggagttccgcctgacagggaaaatcacgctggaaaggattcctaattggggacggcgcgaagttattcctcagcacaaagcgattctggataaattcagtgcgcatgtcacaacgcagagcaactgggctgaaagttccgttagcacagttacaagtgtggctcgtgtatttttgcttgaattagaggaccatggaatagtctccattgaaactgtcgcaatgatggatattaccacatgcgttacaagaatgcttggacgatacactggtggaatgagatctgctctttttggcattcggacctttctgcgatttttatatgaggccgagatcactgcggataatttttgcaaaacactcccggaatttgtttgccctcggaagaactttcgtgaaggattttccgatgatgaattggaacgtctactttctcagccagatatcacatctgcggtcgggaaaagagactacgctatgatggttttggcagtgcaaagcggcttgcggtcttgcgacatcatacggctcacatttgactgcatcaattggagaacgagggaaattcgtgttgttcagcacaaaacaggacaaccaatcgtaattcctcttgaaccggaaacaggcaacgctatagcagattacttgttaaatgggcgccccaagagttcactaccgcaaattttcctctgtcacgtcggcgctgtccgtgctttgaaaagtcgaaccggaagtgcaattgtctccaaatacatgaagggcgcaggaattcattccgggtatcgcggatttcacagtttccggcgcaccttcgctacaaatctgctccagaacgaagtgccaattgagttgatccaacagatgctgggccaaactcatattgattcagcaaagccgtacctgtccattgacganggaattcattccgggtatcgcggatttcacagtttccggcgcaccttcgctacaaatctgctccagaacgaagtgccaattgagttgatccaacagatgctgggccaaactcatattgattcagcaaagccgtacctgtccattgacgagcagggtctgaagttgtgtgcacttcctctgctttctcagggaaagtctggtggcagcagatgatttacacttttgaaagccattttgctgcccgaattgaggcctttatctcacagaaaaacgcgttgggatttggctacctggaatcttctcgtattttgcgggactttgaccgcttttgcctgacccagttcccggatgaggatttcctgacagaagaaatctgtcttgcctgggccacaaaaaaggatacagagggcaataatactttccgcaatcgtatgatgccggtgcgtgagttcgctcggtatttgaaccgcaatggagagactgcctacatcctgccgccggacattgcccgaaaagatgcgccgtatgctccgtacatctacacagaggcagaaattttggcaatttggaacgtccttgaccacttaacaccgcgcgggggctttccagtacggcaatttgtgattcctgccatggtgaaactgctgtattgctgcggcttgcgtccggcggaggtcaggcggttgcgcgttagagacgtagatctggacaaagggaggctgaatattatggagagcaagcagcacagaagccgcatagtcatgatggcggatgatgtggtggaaatgctctcggattgtaatgctgttgtctccgccgttatgccggagcgtgagccgttctttcccaacgctgagggcggctattatgggaaacgtggattggaaaagacctttcgtcagactttaaggaaagccggtattgacggaactggacgtcgttccccacgcctttatgattttcgccacacttttgcaacccaccggctgtaccattggatgcgtgagggcaaggatttaaatgccatgcttccgtatctgagcgcgtacatgggacatgcgcagctctcggatacctactattacattcatctggttcccggtttactggaagaaatgtccggcttagcattttcttctgctgaggcaatcttgccggaggtgagaaccgatgaatgatttttttgacgcagttcggcgctttctgctggactatcttcccaaacaacgctgcctcagcgaaaataccattctctcctataaacagacgctgaacctttttgtgtcctatatgcgggacggaaagggcattgcaactgtagaattgaccttttcccgtattgaccgggatacgattcttggcttcctgacttggctggaaaacgtgcggaaatgtagcgccagtaccagaaaccagcgcttgatggcgctgcgctctttcctggagtttgccggacagatggactgtgcgcagacagcgttgtatctttctgcctgcaatattccctcaaaagaggcgcatggccgagtcgtcgagtttctgacagaaccgtcattgactgcactgcttcagcagcctgacacatccaagcccaaagatttgcggaatctggtattcatgatcctcatgtacgataccgcagctcggtgcagtgaacttctcgatatgaaagtttgtgatctgcgccttgacgcaaaacacccgattgcgtatctgcacggaaaagggcgcaaaatccgcacagtcccactgctcagtaaaacggttcagcattgcaagcaatatctgcgcaagtttcatccgagcacagattgccacagtgaagcaccacttttcttcacggtgattcatgggacacagcaaaaaatgtctcccgatacggtagccgcgttctttgcaaaatatggaagaatggcaaagagcgtttgcccggaagtcccagaacacattcatccgcacatgatgcggcacacacgggcaatgcacttatatcagtccgggatgcccatggtgcttctgtctcaatatcttggtcactcacaggttgagacgacgatgatctatgcccatgcagatacagagatgaaacgtgccgcaattcagaaagctgatgctgtccgcggaaccaagcccgtaccggatgagatttgggctgataacgaggaaatgattttgaagttatctggtctgctctaatcctattgttctatatatgccgattatgttattccgaagtttttgctggtaacgccttgtactacagggtttgcagcgattacttcggaataactatttcctcggcataatcctggttattccgaattcggaataaccaggatttcagcatagcaggcaaacagggggggctgcatggacttgtaagcattgcggccacgtatataatcccctggaagctcactatgatcaacgcgaccattgccctaagtgcggatcaactgaaatcgagaagacccgctcttccttactggtcgaatggctgcgtttcctaagagaaaagaagcctcgcttcgctatctacgagaacgttaaaaatattaccggttctcgtttctatgccacttttaacctctttgtcaaagagctggaagactacggttacaacgtctactggcaggttctgaatgcaaaacactacggaatcccccagaatcgtgagcgtgtttactgtgtcatcattcgtaaggatttagataatgggaagtttaagttcccgtctcctatccctttgaaaaaagcgctggtagatatgctggaggataaggttgacgagcgatactacctgcctgatgacaaggtagctgccatgataacccccccccgttcagacaaatcagtaacaccgtccgcaccagcggaagaggttccacagaccaccactgctgggacttgctcacttgccggtgtgaagctgagtaagaaaggcacccagtttgaaggatactgtgagacggccttgactttgctggcccgtgactataagggctttggaaatcagcaaatgacaggagttatggagcataatgagtaagcgatatattatccccgctgcaattcgtggaagatatgtggggggggtaagataatacagcgtttggaagttcgccctaatatgtgtaccaacactttgacgggtgttcaaaaagacaatgtattgattgagatagatgaaagcgaggaagctaatgtgaaaatcgtatgtgagcgtcgatgcgatgaaggtgtgcgttttttcaaagataatgtctgcggcactattcgcaccattgatgggggggggacaagagagtgattgaaagaagtcctacgtcagaagataaaatcacaatgattggcggcttacaaaagcaccagactccaagaaacgatggtatttgcccatgcataaatagtgccgctggtatgggcggcggacaaacacctatcgcaatacgcccgagttttcgtgtccgtaaacttacgcaaaaagagtgttggcgtttaatgggtttccaagatcaggactttgaacgtgccaaatccgccatgaacgaaaatatctatggtggagcagataggagcgggtcacagctttacaagcaggctggaaactctatcgtggtagacgttctctgtgccattttggatgaacttcacagtgctatgccgtatctctttgaagatatgactgttggttctttcttttccggtatcggcgcatttgaaaaagcactgtctacttttgatattaccgatgttagcgacaaagtaaattattctgataagaatgatgaactgaagcagctcggatatatcaatgattacaatggagacgccaatcgtgtatatgatggcgaaaccattgcacgtgctttgaaagccgaagcgggagggggcggagccaagactggatggtatgctctgagaagcccggaggttgaccatggagaaagtcagaattaagcaggccacccaaaaaggttatatcgagtgtgctgtgggggggtagcggatttatcttacccgtccagtaaaactcgaagaggtcgagtccaggaaggtggttggatttgtccaactatcactgcaacagaaaccggcatttgtcggatagaaagaggtgattcatatgagcattgcgttgagaaaccgccgtgaagcatatgaccagatcgagccgaggcgtcctaatcgtaaggctatgattctggatgttctgaccagcggtgatcctggtggtatgactgctgacgagattggtgagaagctggtctctgagggcaaaatccccaccaacagtccgaacttcacacggcctcgtctgacagagatgaaagccgagggcaaggttgtgatcgtcggcagacgtcttggcaagtctgggtgcaatacggcagtctggaaggtgaagcgctgatgtatggtgaatacacctgtctggactgtggcaaaacctttgacgatccgaagcgatgggaagaacgccatgggttagattctccgccctatgaggatttcagcggttgtccttactgtggcggagcttatgcccgtactatcctttgcgatgcctgcggagaaccgatagtcggcgattatgtcaaaatccaaacaactggcgactgctattgtgatgaatgcttcatgatgaagtcgctgggcgaagacgatccatgagaagaggtcgtgaaatgaaaacttcagtcaaacggcgtgcgaaaaactgcatacggggaacggttttattggcctgtttcattgccgtctggtatgtggcctcgtgcttcacccaaccgctgtttatccccgcccctgctaccgtctgggaagcaatcgtcgggttggcagagacaggccagttgcaaaaaggacttgcctactcttttctgcggattactggtgcgtctgctctttctatgctggtagcaattcccctctcccttctgatttatggcgtgaagcctatcaaggaaactatcatgccggttgtttccttcctgcggtatgttcccgtaaccgcattttctccgctcctgatcctatggtttgggattggggagcagatgaaaatttcgttcctatttattgcgacgtttgtctacttgctgccgtcgatcctgctttgctttaacgacgtaccgcaagatctgatggatacgggcaagacaatcggaatgaccagttgggagacaatcaaagaaatcctgctccccgcatcgctcccttcaatattcagtacgttccttatgatgtatggcattggctggacatactgcgccgtggtagaggcaaccaacgctaagtacggcttgggcttcatcatcaatgtaagctccgccagaggccgtaccgccgtggtgttcggggcaatcatcgtaatcatgttgttcagcttcgtttttgacaagctggggaacttgctgatccgaaagatattccagtggaggtactgcgatgatcaagttgaatgatctggctattgggtacaacggcgaagcaattctggagcacatcgaccaggaatttgacgacggtttgatttacggtattttggcgaagtctggtgccggtaagacgaccctcctcaaaaccatctctggccttcttcaccctgttcatggtgaggttgtcattgatggcactacctatcggaacgccgacaagaaccctgtgtacatgatgcaccagcgctattccaacttcggatggctttcctgcacggagaatgtgctgattgcccaacgggataaaaaactccgtagccgcgatgacgctatcaaggtacttgcagcggttgggttagagcagtatgcagataaatggccgtctcagctatcaggtggtatgcaacagcgccttgcgttggcgaggacactgtatgtcaagccgaaatacctacttatggacgaaccgttatccgccttggacgacaagacccgtagcaaaatgcagcgattgattttggatgtccatgctgagacaggcaacacaatcattatggtaacgcacagccaggacgaggcgttcaaaatgtgcgataaaataatcaaatttgaaacgagaggagctgtaacaaaccatggcaggtttatttgaacgcatgggactggttcgtaccgaatacgaaggtatgcctgaaatccctatgcaacccgtatccgagcctatgtacgcgcctgagacgccggtaattgacgctactcaggtgtcctatgatgatgtgatcgcatcaatctatcagcagggcgatatcgacgacgagaactcgatcttcaagatcaaggcgtatatcgacattctgccccaggatatgactaaggccaagaaacaggcgtccatcgctggcattctcagcgtcaacgggatcaatgtggatgatctcattgaggacggtctgaaacgtggtcgcgtcttggacgctgccgaggatagtatcagggcagaaaacgacgcactgatcgctgagaccgaggcggatatcgaacatctaaagtccctgatcgagcaggcggaagccagaattgaggactccaaacaaaagacctctgattccagcgccgccatccagaaggaaaaagaagctatcagtcaactcgtggagtttgcgaacggcgttgccggtaaggaaggagcacagtaatgggcattgtgattggagcggtagcggttgtatttgtgctcgccctgatcatcttccccggtgtccggggtaagctgaaagtcctcgttggagggttcctcaacatcttcgtggaggatatcgccaagacacccgagggtgcaaaggctgttttccagcaagccattgaggaagtgcaggagcgttacaacaaggctggtgacaccctgaatcggtttgtgggcgagcaatcctccgtccagaagaacctcaacaagctatatggagaactgaaggacgttgaatcaaagtgtgagtctctggtcagatctggcaatatggccgatgctgccattttttcaaccaggcgtgaggaaatcctgtttgaaatctcccagaaagagggatacctgcgagagattgaacctatggtaaaagaggctcagaccgtttatgaagcgtacgacaagaagctccgcgagctgaaaaagcagagccgtatgactgtcgaggaaatgaaactccgtggcaacatgaaggatctcttgggcgatctggacgaactgcgccgggactctgccactgataagctcttgggcagtgtccgggacggagcggaggatcttcgcaaagaggttgatggtgcgattgtcgttcacgcaagccgtaccaccaccaaaatgtcaatggctgagaaaaatgcggcgaaagctcagtcggatgcttacctgcagtctctcgccacaaagtataacgggaagccggctattcaggctccacggtctggcgtcaccttcgacgctcctaaatccaaagtgaaagaggaaaggaagtaacttaccatgaagagaatgaaactcactaccgctggccgtgtggtgatcttcgtcatcgtgctggcgctcctcgctggtatcggcggcttcggctacaactactacaagaacaacatcgcagacgacaaacccatcagttcgggtacccagtctggcagcacatcccagaagcccacgacaaagccctccgccggcaagacggacacctctgatcccgtgattaacctgtctctggatgagtgggtaggctggaagcctattatcgacgctaaccagggcttgaccacgcagcctggttcaattttcgaccagctgggtattaaggtcaacatcaatatcatcaatgacgcaactgccagcagcaacgctttgattaccggagagctgaatgctgcgggttataccaccaaccgtaccgcgttcctgtctggtaagttccaggaggccggattggatgtagtaatgccggtatttaccaactactctgctggtggcgacggcattattgctaagtccggtatcaataccgtaaatgatctgctgggcaagaagatcggtgttcccagattcagcgaagcccagacacttgtggcatggtttgttaataagagtgacctatccgatgctgacaagcagtctatcattgataatatgatcctctttgacgatgcgtctgagacgggcgaggcgttcttcgccggtcagctggacgtggcagcgacttggcagccttacctgtcctatgcaaccgaaaacggcgatgcgcacatcatgttctctaccacagcctctaagagcctgattatggacggtatcgtattccgttccgactttgcccaggcacaccccgacgttgtgaccgcctttattgatggtatcttccaggccaacgcaatgtataccactgagtttgactacatccgttctgtcatgcctatgttcgccggcgtttccgacgaggagattaaggctcagtgcggcgatgccgaaatgatgggctacgccgagaataaggaagtgctggactccactgctccttctgtctacttcgatatgtgtgatatctgggagtctttgggtgagacggtcaatcgcaaggtggctatgacactctttgataaccagtatctgctccctctggcaagcaagtattcttctacctctacctctaccagtaagcccgttgagctgaccgaggagcagaaacaggaaatcgtcaattatgaggcgctgctgaccaaatccatgaccgttgagtttgtggctgataccgctcagttcaagaaccccgaagaggcatacgccatcatggatgagttcgtttctatcgccaatactctggatggcgcgattatccaagtggagggcaatatcaatgcccgcaactactccgactctggacaggcgctgtctgctgaacgtgcaaaggctgtcgccaagtatttcatcgcttgcggtattgatccgaaccgtctgattacggtcggcaatggtaacacgaagatggttgcagatcccggttctgccgatgcttacctgaaccgtagaaccgacgtgttcttcaaaatcatcgaagagtaatcctgcgccttacgaggaggggtgttgtcccctcctcggggcaccaacataataaaggagtggtcaatatggatgtagtgaatgtagaaatcgcaaatttggacgatctgaaaaaacggttcgttgaaatttgcgctactatcaatcgtccgggtatggaagacctgatggcgtggttggaacgttctgacttctatactgcgccggcaagcacgcgcttccacggcaactatactggcgggctgctggagcatagcctcaatgtgtatgacaagctctctgggtttgtggctcgctatcctgaactggagatctcaccggagacggtggcggtcactgcgttgttccacgatctgacgaaggtgaactactacaccgtcagctctcggaacgtcaaggatgatgttacgggcgcatggcataaggagccgttctacaaaacggaagatcgtctcccgcttggtcatggcgagaaatctgtcatcatcctgcagagcttcatcaagctcacacgtgacgaaattgttgcaatccgctggcatatgggcagctttgattgtgcagtcaaaggcggggattacggtatgggcaatgcttttgaaacttacccgctggcagtcatgacgcatttggctgatatggaggctacctatcttgtcgagggtttagcaacaaagtaaatcaacggaggctaacatggaaaaaagcgtttttcaaattctgaacgagtacgatatcacggaacacctcaagaagaaggataagatcgtctacctgccttggtctaaggcatggatgatcgtgaagtccctcttccccagtgccaagtttaccatcaacaaggccgctgacggctgcatttaccatacggacggaaagaccgcctgggtagaggtatctatcaccatcaacgaccagactgaaacggagtctctggctgttatggatttccgtaacaagtctattcccatcgacacgatcacctctgccgatgcagagaagtctatcaagcgctgcttggtcaagtgtgctgctctgcacggcctgggtctgtctctttggacgggtgaggagctgtccagcgccgcccgcaagaagaaggaagacgatctggatgatgtgaaacaggagatcctgagcgttgttgccgggaagctggaagccggtgtgtccaaagacaccatctacaaggctatcgaaagtgttgccggtgtgaagaaccccaacgctatcaaggatatcgcaacggctcagaaagtcgttgagcagatcaagaaactggaggtaaagcacaatgcttaataaggtaatcattatgggtcgtcttacccgcgatcctgagatcaagaaggtaaacaatgacatctccgtgtgcagcttttctatcgcctgcgaccgcgacatcgtgaacaagcagaacaatgagcgcgagacggacttcttcgatgtgactgcgtggcgctctacggcggatttcgttggcaagtattttggcaaggggcgcatgatcgttgttgtcggtcggctgcagaagcgcaactacaccgataaggacggcaacaagcgttctgccgtagacatcattgccgagaacgtctatttcggcgattccaagaaggacggcgagacttctgacaacgcctctgcccccaccaccggatatgctaccgcttcttctcagaacagcgacttcgcaaatatcggtgaggaagatggagagctgcccttctgatggataattcttttctcctggacgctatggactggtcatactcccgcgttagcagttttgatcagtgcccgcgtatgtttgaccttacttacctccagtgcatggatcgcgtggacaacgcttttgctcaatggggttcactggcgcactcgcttttagagcgatattttcgtcagcaggtcgagctgtgggatttatccggcctctatgagaaggaatacgcaagagcagttacagaacggtttccatttccccgactggaagatagctgctatgagcgcggtatggaatacttcgataatttcggtggacaactgggagacgaagaaaaagtgcttgcggtcgaagatcggtatacctctacactgggcggcagaccagtggtaggtattatagacctggtgcttcgtaataggtctgggctgattgtttgcgatcacaaaagccggggcaaatggaaatccagagaggaacgccgcaaatatctccgccaactgaacttgtatgcagtacgggtcaaagaggtctacggtgagtggccgcgtgaactttggttcaacaagttccgcgaaggtatcttggacagagagccattcaacatcgtaactgctcaggaggacatagactggttcctgcgttccattgacgacatctataaggcaaggaattttcctgccaaacctgatcgtttcttttgtgactacctatgttctgtgcgtgagcattgcgagcattccagccaatatgttacggagggatataagtgatggaaaagatcaaggtaattttcctcgacgttgatggtgtgctcaacagtgatcgtacagtccgcaaaacccaaggcggctatacgtttgttgacaacaggcaaatgaagaacctgaagcacatcattaacatgacaggagctaaggtcgttctttccagtgattggagatacgaccgagacgacccgagatacaacggagactatctggaactggaagcagagctgttgaaatacgggattcgtctttacggctttacgccggagctgccatcctgtcacagaggtatggaaattgactgctggctaaaagaacatagcgaggtcggagacttcgtaattctggacgaccgggcagatatcgagccgaacaaagatcactgggttcagacggtaatgcgccgaggactcggtgttgaggaggccgagagtgctatccacatcttgaacggcaaatgaaagacggattttattcggataagacccgtccacatgaagtgggcgggcttaccgaagaactgaggtgattttacccgtgcagattgatagagaaacaattttgcaggccaaagaaaagctcggagaccgtaacgctcaaatcatcgtcgaagagctggggattaccgatttcgatgagaaaaacatgaagtgttgctgccccttccatcaggaggatcacgcttccttcatttacaacaagaaagcattcaactttcgttgtttcggtagttgtggccgtagctacgacattctggacgttttcatgtataaaggcgcaacttatgccgaagcctgcaggaaacttttcgagcttgctgaaatgccctactctttcggagagctgggtgtgaaaaccaaacggcattataggtatccccatgaggttccctgcactgataagtccaaagtgtacgcatatttcgagcaacgtaagatcagtcgtgagacgctggatgctctcgatgtgcggcaggactccgagggaaacgcagtattcaactactacgacacaaacgacgtgttgacgatggtgaaatacaaaccgtcgcataaagtccagcatggtcaagcaaaatgctggtgccagcaaaactctgatacggctccattgctgttcaacatgaaccgtatcaacgttaattctccccttctgatttgtgagggcgagccggattgccttagtgcgattgaggcaggattcaaaaatgctgtttctgtccctctgggcagttcaaacctccactggatcgacgaaaacctggaatggctcgatcagtttgacagcattatcatttgcgccgacaacgatgatgccggcgtgaaaatgcagaaagagtgcgttcctcggctgggtagctggcgaacaaaggttgtagatatcccggcaatccccattggaaatactgggcgggtaacaaaagacctgaatgagatcctttacgtctgcgggaaagacaaggtgttagagctgattttggacgctaaggactctcctgttccttccgtagttgatctttccgatgttgaaccgaccgagtatgaggatgttgacggtgtgactaccgggctgaaagccattgatgatgagctgatgcggctcttttttggaacgcttactatcgtgagtggtcaacccggatctggtaagagcagtcttcttactcagctcgcgtgtaactctctcgataatgacatcggtacatggcttttcagtggagaacttcccaacggtgtagaaaagtcttggttcaactacattttcgccggcccccgcaatatctcagatgcgatctctcgtcggggtaatccttacaagaagatttccacgacgacgcttgccgagatcaacaagacctataaagggcgttggcatatctatcgtgacgactacgacaacatactggataagctcatcgactctatgacggataccgtgcgaaaacacggtgcccgttgcctgatcctcgataacttcatgtgtattgacactgaaaccagcgaagaggagctgcgttctcagacagatacgattaagaagctcattgagtttgctaagaaatatcaagtagctgtaattcttgtttgtcaccctcgaaagatggacgccggaaccaatgtaggtatctatgatatcgctggaaccagcaacatcgtgaacctggcacatcggactattggcctgcggcgagtgacggatgcggagcgtgagaacgctgcaaaatattctgagaagcgccgccagttgctcaaatacgatgtgatcgtaactatcgtcaaagaccgtatgtttggccggcagaatatcgacgttggcctctattacgatcccgcctctcgccgtttcttcggcgatatggacgagtacgaccgtcgtttctcttgggacaagaaggagtacaaagagcctttgcctctccctcctcagctgcttgctgaagagcgtgcctccgaagatgaagcatttggagcggtgaacgacagagagggctaactatggtggatttcggagtatgtgactgtggcggtagcctcatccctgtttggtttacagaagaagagacaaaggttgccaatggcactatgtataagacaggccgagttcgtagggcgtgttctcaccttgtatgtgaggattgtctgaaaaacttttgcgttgacgatacctttgacgggccgtggcacaatcggaggtgatcttattgagcggtaactatacggcataccatgtccatactgaattgtcgctgttagacagcgcgacgaagtttgaggactatatcgctaaggctgtcgagctggggcagactgccattgcttttacggagcatggtaacatctatcagtgggtcgccaaaaagatggcctgtgataaggccggattgaaatatctgcatggctgcgaagtctatttgactgaaaagctgttgcttaccgatccacgcaccggagagcagaataaggtacgcgataactaccacaccatcttgattgccaaaaactacactggtcttcaggagatgaacgagctgatcagccgatcaaatcagggcgaccacttttactacaaaccccgtatcacgtttgatgagttccttggtatttccagtaacgtcatcaagatcagtgcctgccttgcttccccgttgaatcgcatgagcattactcatcctatgtatgagcggctgctgaagcactacgactatctggaaatccaagcgcatgaccacccggagcaggttgcctacaatcgccacttggcggaaatgtctcagaaatacggcatcccgctcattgcaggtaccgatactcatagcctcaacaaatacaaggctgagtgccgaacgatcttgcagttgagtaaacacatcgagtttgccgacgaagatacgtttgaccttacctataaatcctatgacgagttagtagcaatgttcgcaacgcaggacgccttaccggaagcgatgtatttggaggccattgagaacaccaaccgtatggccgactctgtagagccgtttgagctggatatctcgttcaagtatcccattctctatggtgaacgcgatcgagaggtgcttcatcaagttcttgatgataacctacaagcaaagatcaaagagggtgctatcactccagagcagatcgagccgttcaaagcggccattgctgaggaatgccgggtctttgacaaaattgagatgtccggcttcatgcttttcatgagtgaattggtgacatggtgtaaatctcatggtatccccattggtttcaatcgtggttcctgtggtggatctcgtgtagcttatgtcaccaatacaacagacctcaatcctgagacatggcatacagtgttcagccgcttctgtaacgaagatcgtaaggagattggcgatattgatatcgacgtgtcaccctcccagcgcgatctggtttatgactacatcatcaaccgttttggtcaggaaaagaccgcatttattctggcaatcggcactatcaaatccaaaggctgtattgatgagatctgccgtgctttggcactgcgttggaatcgtgaacaccaacgggacgagaaagagttccgtagagtgatggcacagctcaaagatgagaacgtgaagatcgtttttggaaatgcgcgagacggatttagcctgtatttctttgatgaggctggcaatcttcttttgcccagccgcatgaaggacatcccccgtgccgagctgatcaagcagttttccaaagagtacacaaaactcaaagaggaaaacgaaaggatctttgctaagaacccctgggctggtaaggcaagtgccaatatcaaaaaggagtttgaggcagacgaggcagcggctcgggaaaagtatcccgaagtattctactactacgacgggcttcttgacgtggcgatctctcagtctatgcaccctgccggtattgtggcaagccctattaccctccgagataactacggtacgttcatctctgacggtaaggaaatcctgcagattgacatggagtgtgtgcatgaggtcagtttggtcaagtatgacattctcggattgaaaaacatcgagattatcaaagacgcttatgagctgctgggtaagccctacccgaagtctcacgaaatcaactggaacgatgaggctgtctggaaggatatgctgagatctcccattggtatcttccagtttgaaggagagttcgcgttccagatgcttaggcagtacgagccgcacagcattttcgacatgagccttgttacagcggcgcttcgtccttcgggcgcgtcgtaccgcgacgaccttatgcagcacaagcctcacaagaacccctctcctatcatcgacgaacttttggcagataacaatggctatcttatttaccaagaggacgttatcaagttcctacagcaaatctgcggcttctctgggtcagatgcagataacactcgccgcgccatcggacgaaaagacgaagaacggttgaaaaaagctcttccacaaattcttgagggatattgtgaaaagtcaccgcagtcccgtgaagttgcagagcaggaggcaaaggagttcttgcagatcatccaagacgcttccagctatatgtttggttataaccattcagtcgggtactgcatgattggctatctgtgcgcttatctgcggtactaccatccgtatgagttcatcacagcctaccttaacaatgccaacggcgaggaggatgtgaagaacgggaacgagctggcaacgctttacggtatcagaattgtcccgccgcgttttggcctttccaaggataaatatttgctgaataccgaagagaaggttatcgccaagggtatttcttctgtaaagtacatgaatgccgatgttgccaacgaactctatgagctggcaaaggccggcaagcctgagtctttcatggacttgcttatgcagctggacgagaaaacacacttggatacacggcagcgggatattttggtgaagatcgactactttgctgagtatggcaattccaaagagttgttgcgtatggtgaacttcttttctttcttcaagagcggaacgatgaagaagatctccaaggacaaggtaacggctgaattggaacccataatcgcccagtatgcaactgataagtccaaaagcggccagccagctaaaagctataccttcaccgatttgcccggattacttcggtatttggaagtgatggtcagggatatgcacattcaggatttcgacctgaaaagcaaaatgcaaatccagttggaaaatctgggctatatcgacctaaccaccaataaaaaagaagatcagcgaaaactggttattctggatatctaccccttgcggagcaagaaaaccaaagagatttgggcttatgccttgcaggtgcggtcgattggcacgggaaaaacaaatcggtggacaatctactcagaactctacgatcgcaaaccgcttcaacgctacgataccatttatgttcctatgaatggatggggcgagcggcgtgggtatctgtatttgtacaactacgactatgtaatttaggaggcatttttaatgcacgagacgaaatcgaaatggttcaagaaagttctcagggcgacgctgtgtttcttggtagtctgcggatctctgagtgcaatgttgttcgtcccgaacaaaggggaggaaacaccacaagtccccatcgaaaaggaactttgtgtttactctgcgccgcctcaagtgtcgcccacacctacgcctatttctattgaggaagaaccggcagaacccgaggcagaccttaacccatatgcagaactgtcacccacggataccgaaaaagagctgctggcgtgtatggcctacagcgaagcaggaaaccagagctttgatggtcaggttgccgtggtgcaggtagcgcttaaccgctatatgcacgaagcgtattccggcagtatcagtgatattctcttctcaccttgtcagtttgtggtaggagattactatgggtctgtgcagatggaagcagtagatgctgctcttgccggccatccagcgttggatttgaataccgacgtagtgtacttctctactggatctttgacctatggtagctattataagacgatcggcgatcacgtctttcgcacttatatttgatagcaacaaagtaaattaagcaaggaggatcaacatgggaacagttacaattcagcgattcacctataagaaccctatttccatgatcggtgaggaagctggtgtctgctggggtgcagataccagcgaccccgaaaaaaactacaaacgcggcttggattgcttggaaaacgagcacggcagaacgtttgagttcccggatgtctatatgatcctggacggctattctgccagagtgatccgtgagtggtatacccacatcggcggcgctcccaccagactgcaggccagtaccagatatatcgactatgaaagcggtttcgattatgtaacaccgcccagcattgcgggtaactccgccgccgtcaaagtctacgactggattatgaagtgtatccagaccggcttgaagatgttggaagggtttggtatccccagagaggattctgcgcttgggcttcctctgggcatgggcaccaagattgtgtgcaagcataatctccgcaacctaattgatatgtcgcatcagcgggaatgcagcagagcttatcacgagtaccgtggcctgttcgctgatgttggtaacgctctgagagagtattccgacgagtgggcatatctggtcgatcactactttatgccgaagtgtgaatacttcgggttctgccgggagaagaagtcctgcggcagaaaaggaaggagagctgcggaatgaaaatcgtttgtatttcgggtaaagcccagcacggtaaagacactaccgccaaacttttggaggagactttggaagcccaaggcaaccgtgttttgattgcccactacggcgatctggtcaagtacgtatgtaagaccttctttggctgggacggcaagaaagatgaaaagggacgcacgcttctccagcgtgtcggtactgacaaaatccgcgctgtctctcctgattattgggtagatttcatcgtcagtatcctcgacatcttctgcgacgaatgggattacgtgcttatccctgatactcgtttccccaacgagtatgagatctacgaaacctacggcatggacgctattttgttgcgggtagttcgccccaactttgtgtctccgttgaccgaagagcagcagaagcacgcttcggagactgcattggacgattaccagtacgacgctacgatcgtcaacagcggcagtttggaagatctcaaagaggccgtaaacaactttgtgaacaacgctctcaaaggagaactccatgaagaaactgacaattctgtttgatgccgacgataccgtagaaaacctgagtgattgctggattgcaatgttgaacgagcgttatggcacctccgtaacgccggaagatgttcacggctgggatatctcccttgctttccccacgctgacgaaagagcaggtatttggcgtactccatgatgacgagctttggcggcgtatcactccgatccccggctctgttgaggtactccaaaagctctatgacgaggggcaccagctctatatggtgactgcatccagctatcacacctgcaaaacgaaggtggaacggcttttagagctgttccccttcctggactgggagcacatcatttttgcctgcaacaagcaaatggtgcgtggtgatgttttgattgacgatgccccacacaacttggttgggggcgaatacgccaaaattctttttgaccgtccccataatcgtagctttgaccatgtagctcatgatgcgctccgggtaaacacgtgggaagaaattgaccaagttatccacagctatcttttgtaaggaggaatttttatggttgtcattaaacgtgatggccgtgaagccgagtttgacaaaggcaaaattgccaacgccattctcaaggcattcacggaggttgaaaagctcagtgcggtaggagataagaacgaggtgcccaagaaaatctccacccgtttgtataaccgctatcagcggcgcaaccgtgcgatttctgttgaggaaatccaggacgatgttgaaactgagctgatgaaagggggcgagttcgtagtcgccaaagcgtacatcaagtatcgctatgaacatgagcttctgcgaaacgcttcttctctggacggcaaaatcctctctattgcggataacgtcaatgaaacagtcatccaggagaacagcaacaaaaatcccacaatcctctctactcagagagactacatcgccggcgaggtaagccgcgatattactgaccgtctgcttatgccggatgacattaagcaggcgcacgaagagggtgttatccacttccatgacagcgactactttgtgcagcacatgatgaactgctgtctgatcaatctggaagatatgctccagaacggcacagtaatttccggtacgctgattgaaaagcctcactccttctcgactgcctgtaatgttgctacccagattattgcccaggtagccagtaatcagtatggcggtcagtctatctccctgtcccaccttgccccctttgttgaggtgagccgacaaaagattcgcaagcaggtagaggctgagttcctgaaaatttcttccccggacaactttgcagaccctgagaaagtgatctcagatctggtcgaagagcgtgtccgtgaagaagtaaagaagggtgttcagactatccagtatcaagtgattaccctcatgactaccaacggtcaggctcctttcattaccgtctttatgtatctgaacgaggtcagcgatcctcagaccaagaaagacctcgctatgatcatcgaggaggttgtgcggcagcggtaccaaggcgtcaaaaatgagaagggcgtttggacgacaccggcgtttcccaagctgatctatgtgctggaagaggataacatcactgaggattctccctactggtacttgactcagctgtgtgccaagtgctctgccaaacggctggtgcccgactacatctccgaaaagaagatgcgcgagtacaagctgtccaagggcgaaaccgaaggtaacggcgattgctatacctgtatgggatgtcgtagcttcttgacacccgaccgctccggtaacggctgggacaatgttgccaatgccggcaattaccagcccgataagcccaagtattacgggcgtttcaaccagggagtcgtcaccatcaacctccccgatgttgctctgagcgctctgaaagtttgggaagcaaccggcgaccataacgacatccagaatctgtatgacaccttctgggagattttcgatgagcggctggagctgtgtcataaggcgctgcaaatccgtcacgagcgtttgagcggtactctgtccgatgcttctcctatccattggcagtacggcgctttggcccgcctgaaaaagggcgaaaccatcgacaaactgcttcacggcggctactccaccatctctttggggtatgccggcctatacgaatgtgttatggcgatgactggcaagagccataccgacccggacggagagccttttgcactcaaggttatgcagtacatgaacgacaagtgcgctgcatggaaagccgctgaggatatcgactattctctctacggtactcctattgagagcaccacctataaatttgccaagtgtctgcaaaagcgctttggtgtgattgagggcatcaccgataagggctacatcaccaactcctatcacgttcacgtcacagagcatatcaatgcttttgataagctgagatttgagtctcagttccagaaactctctccgggcggagcaatcagctacatcgaagtggcaaacctctctgacaacattcccgccgtactgacggtgttgaagtacatctacgacaacattatgtatgcggagctgaacacgaaatccgactactgccaggtgtgcggctgggataaggaaatcgagattgtggacgacgatcgcggcaagctgatttggaagtgccccaactgcgggaataccgataagagcaagatgaacattgcgcggcgtacctgcggctacatcggcctgaatgactggaatcagggtagaacgcaagaaatcaaagaacgttatgtccacctgggtggcgacgaatgaactacgcgaagatccgcaactatgacgtcgcaaacggagagggagtccgcacctccctcttcgtaagcggatgtacaaatcactgccccggttgctttaatccagaggagcaggattttaactgtggtagaccattcacaaaggagactatcgcagagattcacaaaatgcttgccaaccctgttatctcagggctttctctacttggcggagatccactttgtcaggactacggtgggattcatgatctcattgatctttgtttctacacacattcaatcggtaaaaccgtgtggctatggactggatttatctgggagaactgttataaccctcttttcccggataaagacgaggataatcaccaatttgcacaaatggccttgcttacatcatgtgatgttgtgattgacggccccttcaaaatggagctgtctgaccgaatgttgaaatggtgtggttctgcaaatcagcgggtcatcgacgtacagaaaaccttgcgccaaaagaaaattgtcctatatgaaggtgagcactatgaatgaaaagatcgaatttcgctgtcccaaatgcgggaagctcctggacagtattacactggattatcggttaaagtggctatgcagcaaatgtgccgaggatcaatctgatgttctgcattgtgagcgtggatgtaaggttaaagccgtggatctggacgctgggttgagctgtgatcccaaacaggctcatgagcttttgacagaaggccaggtctacgaggttgaaaagattcatgtcggtggttggtgctcctctatccggctcaaagagtttcccggtaaagagtttaataccgtacacttcattcgttacgaataggaggaaatatggagactgttgaaattttagcaggtggcgaatttgccaatgccgtaaaaagtcttggcctgacatctgccgtgtgtacttaccattatcagcctcagcctacgcattggcgtgaagaataccaagtttggctgttgtccaaagaggattttgacaatatctgtgctatcgacaacgatgactggaaggacgattggggctggtggcgtcacgcttatggttctaatctgggcgctgttgactgcgcctatgttatcaatggtgaaaagctgatggcgtgggatggtcttcagcgtaaagagtggtgtcgggattgcagtgattgcgccggcaccgaaaaggacaaggacgaatgctttcacgaccatcagtaccccgacattctcatctatctttgcgatgaaattggggcttctaccgagcgcaatgtttgcgcttgcacgattgatctggcacggcaaaacaacctaacccttgcagagcttttcaaaaagtatctgggataggtggtgatggttgtgatcaaaattctcatattaaccgaagatcgtgatacttgggttcaaaaaatcacttccgaattgcgcagttgtacctgtcgcaaaatgcttaatccgtatcaaatccaaagcggactgttcttttttgagattcgatctcattattcagagaattgcaaaggggaatgttggtcttgtgttattttggatcagtatatccctcatgagctggaagtctgtgtactgcacccatgtgtaaagaacagtatcatccgcacaaaaaactatcaaattggttgggaggcaaacgaaaatgctcatcattaacctttttggcgctcccggtgctggtaaatccaccggagctgcctatgtcttctctcagttgaaagctgccggcgttaatgccgagcttgtcaccgagttcgccaaagacaaggtatgggaaggaacaaaggccgttttcgagaatcaggcatacatctttggcaagcagtatttccgcatcagccggcttgagggcaaggtcgatgtggtgattaccgattcacctatcctgctttctgcgttctataacgacaacgaccacgtgctgggtgaagagttcgacaaactggttttcaaagtcttcgattactataaccgcatcgacgtgtttgttcatcgggtgaaaacctataacgaagtaggacgcttccagaccgaggaagagagcgatgcaatcagcaaagaaatgctgtgtttcttggacaagttcggtgttgactgtctgcacatcaacggcgatttcgcaggatatgacagcctggttgataccgtactggacgctttggcagcagacggcaagcctcttgtctgcccgcatccttctgatgtctgcccacgcccttctgattcgacagaggcgctaacaattaaggtgcgctatctcagcgataaaatccaaccattggaatatatcgacggcaagtctgactgggttgaccttcgggcagctgaggatgttgagctgaaggctggtgagttcaagctgattcccctgggaattgctatgcagcttcccaagggttatgaagcaatcgtagcccctcgcagctcaacctataagaatttcggtattcgtcaaaccaacagcatcggcgtaatcgacgagacttactgtggtgacaacgaccagtggtatttccccgcccgtgcagaccgccataccgttattcatgtcggcgatcgtatctgtcagtttcgcattgagaagcaccagccccagctgtttttcgagccggtcgatacgctgggcaacgctgatcgaggcggtatcgggtctactgggaagaggtgagtaacgtgcttcagcagaaatatgtgaggggttctttccttcttgaggaaaacgttgacgattccaaagtctactacgagcagcacaaggctaaggtagatgaagttatagcctgggctaaccagttacacatctcttatgtagcttttggcctttcagcagatcacacttatctgtgcgaatacgaagtttacggccagaccacacggatgtgtaagggcgttgcctctgagttgaaagctatgcttaaacctgagtggaaaggcattcgcatgggataccaggttgaggggcatacgcttcaataaggagagctaaaacgtgaatgaaacaccaatttcacccacatctaaatggtgtgataatcagtccgtagacgagctgggcaaagtaatctgcttggctcatctcgctgaggccagagttccagactgtccatacaaaagtaaggaggagcgagcgagcgccaaatatccttgctccgactatgaagaggtgagaacatgaaaggtctattccgaaaacgcggcggcggtaaaacgaccgcattagtttacacatcggcgataaccggatatccgattatcgtaccaactaccatcaacaagcgttacgtaaaagacatggcgcggcggacaggcgtatctatccctgaaccgattgttatgtctgaggataccagaggtcgtcggattggtggtgtactcattgacaacaccgaagaaatcatccgagcgtatgctgcagagcatttcaacgccccggtcatagcctataccataacggtagacggggatggtgatagcgtatgagcctcctccctaatacggtcgtcaatggcaactgcttggaagtcatgaaggaaattgatgatgcgagcattgacatgatcctttgtgatttgccttatggggcgactcagaactcatgggactcggttatcccgcctgctccgctctgggagcagtatgagcggattatcaaaccgaatggtgcaatcctactgttcggacaggataaatttaccgctaccatgatgctctctaaccctaagctgcaccgctacaatatcatctgggacaaggtgctaaagagcggatttctcaacgccaagaaaatgccgcttagagagcacgaggatatcatggtgttctacaaatctccaccgccatatcatccgcaaatgacagttggcgagaaaaaccacaccaagggcaaggccgtagggaaacaggcggaagacgttcattctaaccggagctatggcaactatacattggtagagtcgccagacggtaacatgaagtacccagcgtcaatttggcgcttccctaaaccccacccgtccgtagcgctccacgccactgaaaaacctgttgatctgttgcgctacgcaatccgtacttacactgacaggaatgcaatcgtcctggataactgttgcggcaccggatctactctcattgctgccaagctggaaggacgcagatacattgggattgacaatggcgtgtgtgataaaaagaaaagcccttactatggaatgccttgggcgcaagtagctcaaatcagattggaggcgatcgaccatgaacctgccgatgaacctgaacgacatcgacctttgggagaaggaactactgaaggggtttgcactccctctggggtttctgcctgaaatcggtgaagtagtgaacattctcgaaccgttcaaaagactgactatttttgagccggtcgaaaaagacggagagacaaccgaaaagaaagtcactgtaggtatcatataccgctccgatggcttatatgcttgggataacagcagagctgtacccaacgagtatgacgaggctatcaaatggagtccagccagccagctcccggaatatgccattcggcgtaaggctattgtcaccaagttcgagtacaagccgcttcgatcctttaccgctgatgacatcaaacttcttcggttggactatgcttcacaagatgatccccagcttcttatggaggaatatctgcccatcaagaactttgagttgttgtatggctggtggaagcagcactataaagcgaccctgaaagactgcgacaatccacaggccattatcctccatcttgcttcaacagactgacaacaaacttcattagcaacaaagaaaatcacggcttccctcttgacaaattgggaggccgtgattatactatgtatatagcaacaaagtaaattattctatccttataggaggactgctaaatgaaagtagctatggtaaagcataagccctatggcaaggtgttctggttcgagatccctgagcaccttgtaggcgaacttcagcccggatttcgcgtggcctgtaatacagcgcgtggtcggcggtatggcaccgtagtggctgcggatcttgacgagcaggatgtgaaagaggttatgttggcctccggcgctaccttcccgctctccacaatcgaagccaccacccaggaggtactgataagcgccatcaagattccgggatatatggcccgcacaaagcccagcgatgagaagatcgcaaagcgttttctggagttctatcataccggccagttcaataccaatgttgccctggacgataacgccgtcttgattgacggctattccgcctatctggtagcgcaaaaagttggcctcgcgttcctccctgcaatctacaaggaggtctgaggtatgcccggatttgtaaaacctacaagaaaggtcgtcaacattgaagacgcctttggagagctgattgggaagaaactcataaaggatctccatgacaatgaggagatttgccctgtttgtcatggtatcggcctccgtattgaagataatccttatgggttgtctgacgaccccgataagagagccggccaattcccctacaagcaccagtctatccggttctgcccgaactgttataacggtgttgtacgtttttgccccgactgtggaaagcagattccgagaggccgaacactttgcgactgcgatgccgttgtgcagcgccgccagcaggaagaaaaccgcaaagaaaaagaacggctcgaaaaagcagaaaagcacgagccgaatgcgctcggatcgttatttacaatggcacaaagcgacttctaccctcacaacgaaggatatttcagctgctgggaggatttctttgatagctggaatgaagatcgtgaagagtttgcggagaagccgctgtacgtatggggaaccgaagaggtagagatgagtttcgatgcttcaagcattgtatctgacgcctgcgaggatatgtatgaagatgcctatgatgacattggagcagacgctgttgctgaaatgcagcgctacctcgacgagtggaaaaagaaatatgggcgcacatcctatttgctgactaccaagcacgctatccgtattccttgggaggagatgaaataacaatggcaaagaaaaacgacagtctgggcgaccgcatgaaaggctatgagggtgtttctcgcaacttcttaacccgccgtgtgcccgcaatcatccgacttgacggcaaggcgttccacaccttcacgaagggcatggaaaagcctttcgatctcgtactgactcaggctatgcaggagacgatgaagtatctctgtgagaacatccagggctgtgtgcttggttacactcagtccgatgagatcactctggtgctgacagactatgctactatccagaccgacgcctggtttggatataacattcagaaaatgtgcagcgtttcggcgtcgatggcaactatggcatttaacagggagtttgaacgtatcgctgagggttggtttcacgacaatggcccgtattggggatctatcggtgtcgatgttgacgtcgatcttaccatatataaacggtacaacgcctaccagaaaaagatgttcactgccatgttcgactcccgtgttttctctgtcccaaaagaagaggtctgtaactgtctgatctggcggcagcaggacgcaacccgaaacagcattgaggccgtaggtcaggccaattttagccatcacgagctgcacaaaaagacctgcaacatgattcaggaaatgctttggtctcagcgaggcattaactggaacgatttcctcacagagctgaagcgtggttcctgttgcattaaacggcggcttgaagaaaccatcgacgatcctcgcaaccccggccagaaaattaccgtatgccgtaacagatggattatcgaccacgaaattcccatcttcactcaggatcgggaatatatcgaaagattgatttaaggaggccataaaaatgtcccatatctatgagaatgatacgaagcccattctgagcgaccctccgtatctgttgcaattcattttgtccgtggtgctgtctgtgctctgtggagcgaccatcatgttcatgtggaactggttcgttgtcccgctcgggcttcccataattggcctggtacaagcgctggggcttgatacgctcatcacattcattgtgaccaccagagtcaataccacccccgacccattctgggatcgttggatcactgctatcacctatgcgcttctcacactgttcgccgggtggctgctccatttctttatgtaacccaggaggatatcacaatggatacacaaatggtattgacccacacgggtaaaatctacttcaaccgatcgctcggtttggagtttcttaccgtgggtgactacggcaaagaaaacaacatcaaagccgatttcctcggcttaaccaaaaagattgagggcgttcagcaccacgacgttgaccttatggacaagtgggttgcaactatcagcagccagaagggatgccccatgaagtgtaccttctgcgatgttcataaatacggcttcttcggaaatgcctctctacctgatctggaatatcagatccgctacatcattgaacatgaggatatccgttttaccaaccgtttcaatgttcactacgctcgcatgggtgagccgacttggaatcctgcagtgctggattttaccgagtctcgattggacgacctggttaaagagtgtggtcttcacgctgttaccattcaccccgtagtttccaccatgatgcctcgtagcaataacaacctctccagctatttgaagcattggtgcgaaatcaagaatacccagcggcatggtgaagctggactgcaacttagtatcaacagcacttcagacgaccagcgggaagctcagttcgccggcaaatctctgagcctgagagaaatcgctaatatcgccagcgatttgcctatgccggttggcagaaagtacacgttgaactttgctgtaaccgaagcaacgattttggacgccaaagtgctcgactccctctttgaccgcgataagtttatcgtcaagattaccccgatccaccaaaccaaagccgctctggaacacaactacgatatcactaccagctacgacgattacagtgtctacgacaaattcgagcagcccttacttgatttgggctgggacgtaatcgtgtttgttcccagcaaggaagaggattccgaccgcattacctgcggcaacgctcttattagtgaggtataacacaatgactgaacaagaaaaactaatcaatgttgatctgtatggtgacggtagccgtgactcacggcttcgcgcagagtacatttattgcgatcatgccgatgtgtgttcggtatacaaggaaggaaaatgcttccgtaaaacgacactatttggcgttcgttgtgaatttggccgcatagcctgtgttgatggcggcacaaagaaaaccaagatgtacggtcgtgtttatagcgaggccaaagactctgagcgataccataagctctcttaccccaacaacacctacatcgcaaaaatcggtgacggtgcttttctcgcgccgccccatgtcagaatcgaacgcggcccggattccaggctattctgtcataatcctgggttcggttgcaatcgtctctttgtccctattgacgagctgacgccagacaatatcaatcgaatttgcacctaccatccgcgtgctatgcttggtggagagattgagagctatcaaacagaaaccatcccgatctttctccaccagttgtccaaattattcccggagcagtacaacgctttcatcgcggcgttcccggattatgagctgaaggctcctgattatcgtgggaaatatgcgaagctgtcaacctgcaatcgtgagctaacctatcgtgacgctcatggcaactctttccgttttgacggcgatgagttggtatgtgacaagtatcggattggcgggttcatgccgttctcatcctctggttacgcacaaatgcgtattccggtaacagatgatatgcaggtaaaaattaccgacagcaaccaagtcacagatcaaaccgtccttatgtagtcataaacctttagttagcaacaaagtaaatcaatcataggtggcaaaaatgaaaacccatactctcaaattcaaaggatatcatgggcgacccaaaaagattgctgagatccgtgatctgaacgaagcaggccagcccaaatccgaccagaatattttggatgaggcgtttttgctgattcatgcgttctgtgccgagcgcaatttcaaaatctattacacccgtacttggaatcacaatggcgtcaccatttttgatgtaggaagccatactgagttctttcatcttaccccagcggtcagtctctacgcggacaccgcttcatcagaaaggagtaaacaaaatggctaaggtttcaaccagaatcccgccgctcatttccctttatttctgccaagaaagaggcgaccctgactatgggtcttgcctctgggcagtttttaacttcgatctcgaacgatatgagctgtccattacatccgactgtgggaactacgcctacggttgggttcctacccacaaaagcgagagctttatgcacctcatggcaaggttggactccggctatctgctggataagctcgccagcccgtgcgttatcaacgaagaagccacctttgaggctgtaaaagaactcatggaggcttggggcgttgatttctcagaaacagatcgttggggagaccccgtattcgatatggacgaaatcaaagactgttgctatcagagcaacgagcgagatgtccacgatgccttggagcgaaagttcgagggcacatctatggaaacctgtgacgattacgacctctggagctgcattcaaaaagacttcacagccaatgccaagaagattgtgcaagtatttatggatcatattcgccccatgtgcaagaaactctccctaagtgatgttcaaatagcggaggccgacaaagacggacggctggtggcgctgccgtctgacaaagcgttgaccaatgcagaccgtatgcgagctgcgacaaatcagcagttggcgaaactgttatacgataaccaaaaagagttttgtaggttaatgtacaaaaatcttgggtttgaagatgaattgactttttctgaggattactcggacatcttagcttggttaaatacaccagcggagatgggagtagtagctgctgtcaatgaactgagggagaaccatgagtaaaatcaaattgttgtcaaaacttgaccttgcggtaatcgaaaaaaataacggcaaaaaacgatgccaagcggtatttacccctaaacgttttatgcctctgcttgattatgacaaagtattggacaagctgaatgagcttgttgaagctgtaaaccgattggaggaaaagatggcagccgatcatgatgatcgaggagaataaccatgagagcaacaaagcaattcaataacgtagacacccagagcaaaatcacaattaacactgacgagcttcaggccatgttgagttgtggccggtattctgccatacagattggcgaggctgctgaggctcgtatccagatcgggaagcgaatcttctggaatgtcgaaaaaatcaaaagctacatcaactctatttctgtataggagactgccgtatgaacacttacctgaccatcatggtaacgatcttagttcttactcagattatccgtatcattcaaaacaccattcagcttcgccggcagtataagctgtttcaggctcaactcggacagctggataacatcacccaagaggatcttgatatgcaacgtagagcatatcgcttgatcgtagatcactttgaacacaagaggagtgaggcgtaatgaccaaagaagaggctatcgctgtctttgaatgtttggcaacagaaataactgcaattttggcaggaatcccaaaaagcgaagccgcagcgggtcaaataaaaaggtacattgatgcctgtgatatagcgatttccgctcttcgtatccagcagaagcaggagagcgaatgtgcaaattgtagtggcattgtgtatcgtcaaacagatagtgggaaaatcatccccgttgaccagcgttgcggcgtaaaaattacgcctccatgctacgtgcctgatggcgatggatgtgcttatcaaatctatggagacaacaacgacgagccaatcgcccgctgtaagtcttgcccgttgtgccagagcgataagatcagacataaacaagagtctgtacacaatgatcctctggtgcttgatgagctacgacagatgcgcggtgaacctgtatggtgtaaagagttagaatgctacggcattgtgaagatggagaaagtcggaagctgggcgaacgagctatttttggttggaacatggcataatggcgataccgccgtaaactttgagtacgacatcaaatcacgtggtcttacgctttaccggcataagccggaggtggggacggtatgagcaaacccatgagcgagcaaatgcagaaattggcggctcgatacgaaaaggcgactggtaagaagttcaatgcgaaaacgaatgcacagaaaatccgttccatgacagacgaggagctggcgaaattgtttgaagaactttgctacgacagcatggcgcatcgtgccaaatattggctacactggctccagcggccagcggaggaggaaccgaaatgaacattaccagaaaacgcttcattgttatgcgtaacaaccgaagcgaagtgtggtgcggcctatcaaagaacttttacttcaagccgatttcagagataaaagacacgcccataaaaacgtatcgctctcaagcgcaggcgaaagccgggtgctcatcttgggatagaaattttgaagtcgtcccggtaatagaaaccatagagatagatccttcagctaatagcagccatatgaaattcaaagtcggatcaaaagttcgcgtgaaaaacgtgtatagcggcggcaactttgatgacggagatatcgtaaccattaagcaaattgataatgaagataagccaaactgctatggtgcgatttcgccatacgatggattgatgtggtatttgaacgaagatgagattgaagccgtagagaaagaggtgcgagatgaactttaagcagtttgtccggtggaggttggtttgctttgttcaaactcatatcagacattgccaggaatgccttggcagtaatgggcactgccaagaatgtaacgactggcaccacttattccgcagagactggcaacggacgtattggaggaggaagttctgatcatgagcaataatgcgaactgcattacctgtaggcataaaaaggacttcttagttccgtgcgattggttgaaaaaccaaagagcagtgattatgccgccctgcccaagatacgagtccgaagaggaggataccgatgcccgaattaaacttaaagccattaccttgcccattttgcggcagcacaaagctgaaagtcgatcagaaagcaagcagtaatacgaagtggaaccccgaaacagggagatgcgataaactggtcgtcgttacagttcgttgcaacaaatgccacacgagaggcccgacagtctctatgtacgcagggtggtatgatcggcctgctcaggttttgaataatgctgctatcgaagcctggaatcagcgtatcgaaaaggaggtggctaacgataccatttgttgttgatagcataaaaaagagcgtaggtgaaaaccctacgctcttatagctttagatttcttcgccattatcatttctgagaaatcttccttcaaaatgacagtccagcgcattggcgatctctgctaattccttttcactgaaattatcacgtctgaatttaccactaagattttgagaagtacagttaagccgcgacgctaattctttcaaagtcatgttacgcttgataagtgcaattttgattttctcggccattgccatactaacacctcacaatctttgctaaatcattataaattgctaaagcacaaaaatcaatagacagttttcaaagtaacctattagcgattttatcgcttgactttagaaacccctcaagatattatgtaactgtagacttaccatcgaaacaaaggaggatgataagtatggctggcttaaaacgaacagacaacaaaggtcgtatcttaaaagacggcgaaacccaaaggaaagacggtacctaccgttttacttacaccgacgcagatggtgttcggcatgacgtgtatagcaaacgactggttccaactgaccgcctccctccgggctgcaaagacgatctctgccttagagaaaaagaacgaaagatcaaccgcgatctggaagacggcatcaaggctgcggtcgaaaacaaagctgcgctcaatgatctgttcgagttgtatatggcaaacaagcccgagctgaaagataccactcgtagcaattacctctatatgtataacaagtatgtgaggaacgatattggcaagaaaaagatagccagtatcaaatattcagatgtcaaggctttctataacaagctcatcaaagagaagggcttcaagcctaactctatggaaattattcacaccatcatccaccccatatttactctggccgtccgtgataattacatccgtatcaacccggctaccggagcgatggcggaaatcaaaaagagccacaactgggagaagccaaagcgtcacgcgctgaccatcgcagagcagacggcatttattgactatatgagaaatcacaaagtttataatcattggctccccttgttcactgtcttgcttggtactggatgccgtatcggtgaagccattggcctgcgctgggaagactgcgactttgacgaagggatcatcagtatcaaccacaatatggtctaccgaaagtatgaggaagacgaaaaggcgcgtttccatatcgtaacaccaaaaacaagcgccggcgtccgtattgtgcctatgttatcagaggtcaaagccgctctgcagtcagaatgggaaacacaaaagatagtcgggttcaatgagtccgttgttgatgggtatactggcttcattttccaaaaccgctacggcgatcctctctctcctcatagtgtcaaccgagctattgaccgcatttgtgacgcctacatcgaagatgaaacggtgctggccgatcaagaggggcgagatcctgtattgattcgtcacttttctgctcataatctgcgtcatactttctgtacgcggttttgtgagaacgagcgaaatattaaagtcattcaggaaatcatgggtcatgctgatattgaaactaccatgaacatctatgctgaagctacgaaggaaaagaagaaagaatctttctccaacctcgaaggaaaaatcaagatctcttgaggaggatttcaatgggaaagctgatagatcttaccgaccgcacattcgatatgctgaccgttataaaaagggttgaggacagaaaaccaggccgtcctatgtggttgtgccagtgtgagtgcggcaataccgttgtcgtgtcctctacaaatctgctacgaaccaatagtacaaaatcatgcggctgtcttcggcatacttcctctcccaccctcattgatttgaggggcaaaacatttggcaagttgaaagtaatagagaaagacccagactcaaaaccaggtaaagcaaaatggatctgcgaatgcaaatgcggaaacatcgtgtctgtcctctccgatagtctccgcaatggaaaaaccagatcctgcggttgcgcccgatctcagatcaagcatgaccttacaaatcagacgttcggctttcttaaagtaatcgagccggtaaaaaacgagagaatcaaaggtaatgaaactcgctggaaatgcctctgccagaattgtggacgcaccgttgaggttagcagctattggttgaggcatagcgatccctatggacactgtaaatgtaccagatttaacaaacctttgtaaaagccatttacagcctctctgagcgcttcaaatcttaaaggtgaaactctaccctcgaacaatttaatcgccgctcctgcgttgcccagtggctccgctggcaaaaaaaagatagggtacagaaatccgtcgaggaaatctgtatccttgttttataaaaaaatagggagccagcattaagccggctcccatagaaggttttacttgtgacgatattctttacacttcgtttccaacaatacgaagtcattacaccttttcgccaacggtgtcttgtctccatttatttgcttatgcttatataaagcagctgcgttctttctgattttctcttgaattgatttaatgaaccgatactctgccaaaagaagtgacctatatgacgggtctcttacctggttaaaattcacatatcggcactccgaaataggaacggggaacatattattcaaattgattacagcataatcctcaacctttaggaaatcaagcccttccttcatctttctatgctttggtttgaatgaagagagcggggcaaaatagtcaaagccattgatctgtaaaactacccctatgtactttcgttcattagcttgtcccttttgacgattatgaaaaaggtgtggcgcatatggaaccaagtagtcaatatacgctgcatcaatttcataaatctttatgctttccatattccctccattcaaacagaaagggcgggcacgaagcccgccctcctgttacaatcgcattctgagtagcgaaacactcacttgtaactttcttgatcatagagtcaagagaaactcactcgataactttctcacttagggctgagatacacccctgttaagagtattcctactcctaagtatattataagtgcctcacccgaatttgtcaagtagtaaagtctgccacataatgagccatccagtcaggcatcttcgcacggaaggtatctggcaacttttattgtcgaaaggcaaaacgattttgtcaaacaagagtatggcaactactccacactcttcaccaagcatcgcttgggtgatcttgccgatctaaaattgtttttgaaataagaggttcttccaaccctccatatttcaacttctcatcccgcgtaattttgctggggtaactctggggttttgaaatgaaatgtggtaaagctgtggtaaaatgaaaatcacttctcaaatgctacaactttttgttctcgaaacaggtatttctccttgtttttaacccatttcagaacatttttcaagtattactctccgagcggcttcatcgtcgggaagaggatgacgtcgcggatggagtcggtaccgcagagcatcatcgcgcagcggtcgatgccgaagcccaggccgcccgtcgggggcagaccgtattcgagggccatgacgtaatcctcgtccatcatctcggcctcgtcgtcgccgttggcgcgcttttcgacctgcgccttgaagcgctcgtactgatccatcgggtcgttgagctcagtgaaagcgttgcccatctcgcagccgcagacgaacatctcgtagcgctcggtgaggtacgggtcagacgggctgcgcttggcaagcgggctcacttcgacggggtacatggtgatgaacgtcggctggacgagggtctcctcgaccttctggtcgaaggtctcgtacagggcgttgccccaggtcttgtccacgccgtccatgtcgacgccgacgctcttggcgagcgcgacggcggcctcggcgtcgccctcgatcgccataaagtccgcgccggtcacttccttgacggcgtcagccatcgtgacacgcttccacgacggggtcaggtcaatgtccttgccgagccactggatctgataggtgccgaggatctccttcgcggcgccggagaggatggcctcgaggatgtccatcatgccgtcgaggttcgtgtaggcctgatagagctcgcaggtggtgaactcggggttgtgcttggtgtccataccctcgttgcggaagatgcggccgacctcgtacacgcgctccatgccgccgacgatcaggcgctttaagtgcagctcggtggcgatgcgcatgtacatgtcgatatcgagggtattgtggtgcgtgatgaaggggcgcgcgttcgcgccgcccgcgatggggctcaaaaccggcgtctcgacctccataaagccgatggagtcgaggtagcggcgcagatacgcgacaaacttcgaacgaatttcgaagttgcgcttggactcggggttgatgatcaggtccacatagcgctgacggtagcgcgcttccttatcggtcaggccgtggtacttctccggcaggggacgcagagacttactgagcagcgtgatcttcttggcgcgcacgctcatctcgccgcgctgggtgcggaacacctcgccctcgacgccgacgatatcgccgatgtcgtacttcttgaagcggttgtactcctcctcatccatctcgtccttgcgggcgtagagctggatgcggccggacttgtcctgcagatcgcaaaagctgaccttgcccatgccgcgcttgctcatcaggcggcccgcgacacggacctcgctgccctcaagcgcgtcaaagttgtccttgatgtcctgagcgtggtgcgtcacgtcgaagcgcgtctccttgaagggatcgcggccctcggcgcgcagcgctgcgagcttttcgcggcggaccttcaggatctcgctgaggtcctgctcgggagcgttggtctggatattttcttcagccatgatatttctttactcctactctatataatacagcttaacgttcgatcttgacgatgcggtagacgatggcaccgacaggggcctccacggtgacctcatcgccctcttttgcgcccatgagcgccttgccgaagggggaatcctcggagatggcgcggtgcatggggtcggcctcctgcgagccgacgaccttatactcgggcagctcgcggccggacttcacatcctgcacggtcacacggcagccgatgctgatgccgttcgtgcccgcgtcgttttcgtcgacgatgacggtgtgcagcagaatctcctcgacctcagcgatacgggagtacagcttgccctgctcgtttttcgcttcatcatattcgctgttttcgctcaggtcgccgaagccgcgcgcctctttgatgaggtccgccacttccttttcacgcacggtcttgaggtaggtgagctccttttgcagctcttccttgcgctccgcgctcatcttgtactcttttttcatgttcgccatattgagatcgttcctttctttcgcgcccgcaaaattgcgcggcgcgcacacgaataccattttagcgaaataattatagtgattttgccccgtgttgtcaaggtaagtttgcgttttctcccccatcgggcggcattttcacatcttttacccaaatttcgtccgcgcggcgcgcaagcgaggcgtagagtgcgcagatgagctgatcttcattccagatcatcgctgcatcgcccaggttttccgtcccataggcgacagaaaccgcaccgctccccagcggcagcacaaggccgtcgggcagcgggaaatcgtcgaagcagacgctcaggtcggcggcgatcctctcgtccgtctgcaatgtatggacactcgcgccgcagtcccagcgcagcgtgcgcgcaaggcgctcgccatttggcgcgcagagtgcaagatagcgcacatctttagagagctcgcgcgccgccgcttcgagcgccgcactctgcgagggtgcgcacagcgcgatacgtgcccgctccggcgcaaggccgagccgcgccatcgcgcggcggatgatctccgccgcctttgccatgcgcagcggcttttcgggcggcggcaggacaccacagcgcgcaaatacctccgcatatggataatccttgggaaacacggcataactcacgcggcgcttttgcaggtattttgctgcgcgcttggctgaaagtgcagcaagcattccctcgccgcgcgatgcgtaggccgcgccaaagcgcacgccgcaaagtgtgcgcgcgccgtttttctcccccgtgtcccgatagcagaccaatccctgcaaaatgacccctccccgcaaaaaagctccccgccagtatatggcggggagcttgtgcgttatgcggtttaccaacccttgatatagtccgtgaggtacttgagcgggttgatgatctgtccgttctcggtgatctcaaagtgcaggtgcgggccgctgctcacgccagtcgtaccggtgatgccgacgacctgaccctgcgcgacatacgtgcccacgctgaccgaacgggatgacaaatgctgatacgtcgtcgtgttgccgctgccgtggctgacgaccacatagttgccgcggtacttgttgtaggccgagatgatgaccgtgcccgccttggcggcgacggcctgcgtcgtgtagcccacgcggccgatgtcaatgcccgcgtgattcgtcgacgcgcccgcgatgcccgtgtagcgcgcgccgagcggcgaggtgacatacttgctcgagcacggccagatgtagccgccataggtcacggtggtgttgccgttcttttcggcaagctcacgggaaaggcgcacgatctccgcctgctggcgctccatcgcggcgtccttttccgaaaggacctgcttgtactgcgcttcgttcgccttgagctcggcaagcaccttttccgcctcggcgcgctgggtattcagctcgctctttttggcaacgagcgtctccttggcgctctgctgctcggcaagggaggtctcgagcgaagccttcttctgctcgatctgctcgcgcagggcacgcaaatcgtcgatgaccttctggtcgctgtccatgatctcgctgatgaagtccatggcgctcaaaaggtcggaaaagcttgccgagtcgaacagcaccgaccagtaggacaccgtgccgcgctcctccatcgagcgcacacgctcgcagaacttttcgtactggcgcgcctcttcctcttcgttctcgcggatctcctgctcggtctgcgtgatcagcgtctcatactcgctgatgagcgactcaacgcccttgatctccgactgaagcaagttgatctgcttgtcgatgttctccttctgcgcaagggccgcgctcttgtcgttctggatggacttgagctccttttccagctgcgacttttccgagttcataccgctgagctcgtctttgagcttgtcgatatccgcctgcgtaacagcggaggcgtcctgcaccagggaaagcggtgtcaactccgtcagcgtcagcgacgcgaagacggccagcaccaggaggatgcgtgcgatcttttttctgctcatcgtccgcctccctcacacgtgcaggaacttgcggatagccgtcaggctgccacccacaccgatcaggataccggcggcggcaaagatcgcagccacgggccgccagatcgacgtaaagtcgacgatcgtgagaagctgcagccggtcggacatcgcaaggctctttgcgaccgattcatacagcagccactgcaagccaaagccaagcaccgcgctgagaaggccgatcataaagccctcgtacacgaacggccagcggatgaagccgttcgtcgcgccgaccatcttcataatggcgatctcgtcgcggcggtcgaatgtcgtgagcttgatggtattcgagatgatgaagaccgacacgagcagcaaaatggcaatgagcgcgatgcacactacgctcgcaacatttcgcagcgtgataaagccgcccgcgatgtcttcgtccacgcggacattggcaacgccttcgacattgtcgaggatatcctgcgcagtcttgccggaaatgctcagatcgtcaacatagacagcgtagcggtcgcgcaaaatctcggggtcaaggttctggaacatgttgtccccctcgtaacgcgcctcaaaggacttcatcgcctcttccttgctgatgaagatgcattccttcacgttggcgcgctgctcgatggcgcggcccacggccttggtctgcgcatcgtcgcagctctcgtccacgaaggcgagaatttcatactcgctctcgagttgctggagctgcacctgcgcattgtacgccacgagcgaaaatgtacccatgacgacaaggcaggcgaccgtgatgcccacggccgcaaaggacatgaatccgtgcgagaacatgttgcgcatgccctcgccgaaaaagtaagaaaaatcgtgtttgcgcatagcttacctcgcattatagccgacgccgtcgccatcgctcgtgatgacgccctgttcgagcgtgacgacgcgttttttgaactgattgacaagatctttctcgtgcgtgacgacgaccatcgtcgtgccgagctggttgatgcgctcgagcaggcgcatgatctccagcgagcgcgcggggtccaggttgcccgtcggctcgtcggcgatgatggtgctggggttgttgatgagcgcacgcgcaatggccacgcgctgctgttcgccgccggagagctcgttgggataacggtcggtcttttcctcaagtccgacgagctcaagcacataggggatgcgctttttgatctcgcgcggcgaagaaccgacggcgcgcatggcgaagctcaggttctcgtagaccgttttcttctcgatcaggcggaagtcctggaagatgacgccgacggagcggcgcagcagcgggatctgccgctcggcaatgttcgtcaggctgaagccgttgacggcgatctggccggacgtcggtacgatctcgccggtgagcagcttgatgatcgtcgacttgccgctgccgctcgggccgaccaaaaagacgaactccccatcctcgatgcgaagcgaaatgccctttaaggccgtcgtgccgctctcgtattcctttactacatcgctcaggcgtatcatgctcttccctcagtttccagcaggttttgactcgatcccgcaaattttcagtctttattatagcgcggcaagtccgcgatggcaacaggtaattatgtaaactttcaacttttttgccgcaaaatggcgaaaaaacaaggactgtctgaagacagcccttgtcaaattctttttctttacgcttcgatgccgcgggaggcaaggtactttttgaccatgagcgcgaccttgaaggtgatggcgtcgtcaaactcgcgcaagtcgaggcccgtgagcttcttgatcttctcgagacggtagacgagcgtatttctgtggacgaacagctttctcgccgtttcggagaggatgaggttgttctcgaagaacttgttgatcgtaaagagcgtctccttgtcgagcgcgtcgatggggttcttcttgaagacctcctgcaggaacatttcgcacagtgtcgtcggcagctgataaatgaggcggccgatgcctaggttttcatagctgatgatatacttctcggtgtcgaagaccttgccgacctcgatggccatctgcgcttccttataggacttcgcgaggtcgcgcaggtgcgtcgccaccgtgccgataccgacgaccacggtgctctcaccgttcacgcgcagcgtctcttcgatctgcgcggcggtcttttcaaggtcgctcatctccacattgtcgccgagctgctgcacgagcaccacatcgtcctcgcccatggaaaggacaaagctcgtctgccggtcggggaagatattctgcacggtctcgacggggatagcgtcggccttttcgtccgtgcggcggatgacgaacacgccgcggttgagctcggcttcgacgtgcagctccttggcgcggacgtagatatcgctcaacagaatgttgtcggagaggatgctcttgacgaacgacgtcttgtcgtgcttttcctcgtaatagctcttggcggtgttgagcgcgacggtcgccatgctgcagacggtcgcgctgagcgcgtcctcgccgcgggtgaaggccgcaaagtcgaactgaccgccccagccctcgagcgccttgaaggtcttgccctcgagcgcggtgcaggcgccctcggcctcgttgatgggctgcaccagatgcggccagcgctggccgatctccggcaggtcggtgcaggcgatgaccgtaccctcggagtcgatcacgccaatgaccgtatcggtcgtttccttaaactgtaaaacgatgttctgaaaaatcctaccggacatattccgtgcctccttgatttattagggagtttgtgcattctgccaacttgatgggactattatactttctccgtctgacgattgcaagaacttttttctcttttcaacaatttttttcttcttttttaggcattccgtaaaggaaggacaaacgcttacttgtccgcgcccgcttttccttgggcaaattgccaactttcccgcaggtttttgatctcttccgccgtgagcaggcggtattcgcccttggaaagtccctcgtcaagcgtgagtgagcccatgctcagccgctttaagtaaacgaccggctttccgcgtgaagccagcatccgcttgatctggtggaacttgccctcgtggatggtgatgagcgcctcgctctgcgcgtcgctctttaaaatctcaagctttgccggaaggcattcaagcccgtcgccgagcgtgatgccctgctcgaaggctttacagtcagcgtcgtcgagcgcgccgtcggtgcggacaaagtagaccttgtcgacgtgctttttcggcgcgagcaggtcgtgcgcgagcgcgccgtcgtcggtcagaagcagcatcccctccgtgtccttgtcgagccgcccgacgggaaacaggccgatctttcgatactcgggcgcaagcaggtcgagcaccgtctccccgcgtccgtcctcggtggctgagagcacgcccgcgggcttgtggagcatcacatacgtgtgctcgcggtagaaaagctcttcgccgttcacgctgatgcgcgcggtcaaggggtcgcacttgtcctccgcgctggccgcgatgcgcccgtcgacgagcacgcgaccctcgcgcacgagggtcttgacctcgcggcgcgaatagcgcccggtcgaggcgatgatcttgtcgagtctctgctgtgccatggtggttcccgcctttctgcattctgaagtatcagtgtagcatactttttctttcggtggaatagcttttatcgaaagggtgtggtcgcttcatgttcatcatcaccgccaagtgctccaaacgccgcgttgtaaaaattctgctcatcttcgcgctgctgctctcgctctttctggcgctgcgcgcgtgccggcattcgtctccgccgcccgtcatcgccgccggaacaaatgaagagcgcattgcttatcttgcctccctcggctgggaggtgaacgaccagccgatcgaaacgctgagcgtcacgctgggcaaaacgctcgaagagccgtatttgagctacaacgacctccagctctcgcagggctttgacctcacacgctattgcgggcagacgctctcgcgttacacctatgttgtgaccaactatcctgacgcctcgctcccctgtcaggccgatctgtacgtctgtgacggcgtgcttgccgcgggcgacatcgtctgcaccggcgaaaacggctttatgacgtctctcgccttccccgccggttgacagcgctttcttcttcctctcaggcccccgcgcgggggctttttctttttgactattgcgcgcagctgtggtatgattttgaagaatagagataaaggaatcgacccatggaattttacaccctcgccagttcgagcgccggcaacgccgcgctcgtctgtcacaacgatacccaccttctcatcgacgcgggcatctcctgccgccgcatcacgcagtcgctcgcagtgcttgatctcacgctcgacgacctcgacggcattctcatcacgcacgagcacgttgaccatgtgcgcggtctgggtacgctgcaaaaaaagcatgcgatcccgctctacgcaagttttggcaccgctgccgcgctcgactatcccgcgccgtatctgcatgcctttgccgcggatgagacctttgccatcaaggacctgcacgtccgctcgttccgcacgtcgcacgacgcgaaagagagcgtcggctaccgcatcgaaagcagcgacggctcgctcgccgtgctgaccgacaccggctacatcaccgatgaagcgcacgacctcgccctcggagcggacatgctgctgctcgagtcgaaccacgatgtcgtcatgctcaaaaatggcggctatccctattatctcaagcagcgcattctcggcgaatgcgggcatttatccaacgaagctgcggcggaattcgccgtggaatgcgtccgcgccggcacgagcgacattctgctcgcgcacctgagcgacgagaacaactccccgcagcttgccgaatacaccgtcggccgcgcgctgcaatcgagcgggctgagcgtccgccttgccaccgcgccgcgcgacaccatcagcgaggtacacgtatgcagaagatcaccgtcctttgcgtcggaaaactgaaggaggccttctacgagcaggccgtcaaggaatacgaaaagcgcctttcgcgctactgtaagttagagcttttggaactgcccgagcaacgtctcggcgacgagccgagcgaggcggagatccgtcaggcgcttaaaaaagaggccgcactggtcgagcagaagctgccaaagggcggcgcgctcatcgccatgtgcatcgaagggcaggagatgagcagcgtggcgctgagcgaaaagatgcagcagtttgccgcgcgcggcgcctcacagctgacatttctgatcggctcaagcttcggtcttgacgaggacttaaagaaaaaggccgacctgcgcctttcgatgtcgccaatgaccttcccgcaccacttagcgcgcgtgatgctgctcgagcaaatctaccgcgcctaccagatcgaggccggaaccaaataccacaaatgacccatcatcaacataaaggaggacaacgcccatgttggatgaagtgaagctcacctggggcaagacagaaaacgaccttttgcagcgctggcccaaatccgccgacggcacgccggaggagcccgcgcttttgaccgtcgcaatggacacgaacgccgagacggacatgctctgcgccatgctccgctcgtatgacatccccgtgctgcgcaaatacgagggcgagggctcgttcggcaagatcgtgctcggcatgcccggcagcggcacgtggctctatgtgccgtcctcgatgcttgaggacgcaaaaaatctgatccgccccattgatgaaattccggaacaggaggacatgcaatgaattaccgtcaggaatatgaaaagtggctcgcctcccccgcgctgagcgaggacgagagaaacgagctcaaggccatcgcaaacgatgaaaaggagattgaaaaccgcttctacggtccgctcgaattcggcacggccggcctgcgcggcacgatgtacgttggccttcacaacatgaaccgccacgtcatccgctgggcgacgcagggctttgccaacgtcatccgcgctgagggcgaagaggccatgaaaaagggcgtcgccatctgcatggactgccgcaaccactcgatggagtttgcgcgcgccgcggcctgcgtcatggcgggcaacggcatcaacgtcaagctctttgagtccctgcgcccgacgcctgagctctcgttcgccgtgcgcgaatacggctgcgaggcgggcatcaacgtcaccgcgtcgcacaatcccaaggagtacaacggctacaaggtctactggtcggacggcgcgcagctgccgccccagcacgccgcggccatcgccaaggagctcgagcacatcgacattttcaccggcgtcacgtcgatggacttcgatgaagccgtcaacaagggtctcatcacgatgctcggtgaggactgcgacgagcgcttcatgactaacgtcatgagcatggtcaacgactatgagaccgtcaaaaaggtcgcgggcgacttcaagctcgtctacacgcccttccatggctgcggccacaagctcgtgcccgaggcgctgacgcgtcttggcatcaagcaccttttatgcgtacccgagcagatggtcatcgacggcaatttcccgaccgtcgtgtccccgaaccccgagaatcccgagggcttctacctcgccatcgaccttgccaaaaagaacgacgtcgactttatcctcggcaccgaccccgacagcgaccgcgtgggcatcatggtgcgcaacaagcagggcgagttcgagcctgtcaccggcaaccagacgggcgtgctgctgctcgactatctgatcggtgcgatgaagcgcgcgggcaagctgcctgcgaacgccgccgcgctcaagaccatcgtgacgaccgaaatggcgcgcgccgtcgcggaggcgaacggtctcgactgctacgacacgttcacgggctttaagttcatggccgagaagatgaacgagcttgagggcgcgggcaaaaacaccgtcatcttctcctacgaggagagctacggctacatgatcggccactacgtgcgcgacaaggacgcagtcacggcctcgctgctgctcaccgaaatggccgcgtggtactactcccagggcatgacgctcttcgacgcgctcaacgcgctctttgaaaagtacggctggtacggtgaaaagacgcacaacctcgtcatgccgggcttagatggtgcggagaagatggccgctcttatgaagtccctgcgcgagacgccgccgagcgagatcgcgggcgtcaaggtcgcgacgtacaaggattattcggatggcaccgcgcgcgacgccgcaagcggcgaggtcacgaagatcgctctctcgggctcgaacgtgctgcgcttcgagctctgcgacggcacgcacatcgtcgtgcgcccgagcggcaccgagccgaagatcaaggtctacatcctcaccaagggtgcggacgcgagcgaacgcgacgcaaacctcgccaaatactccgcctgggtcaacaccctcgcctgatatttccctatcccaaagcagcaaagggcggcgcggatcacgcgccgccccttttctatctttgccgccacgcggcgaaaggatggttccctttcatggcaatgctcgcactctactggtccattatgatcgcctgctacctcatcgcaggcaagctgcgccgccataaggaccgctttcattttctggacaagctcacgagctttttcatctatctgctcatcttcctcatggggctgcgcatgggcgcggatgaggaggtgacgtcgagccttggcagcatcggcgtgcaggcgttgttcgtcacactgctcaccgccgtcggcagtatgctcggcgcgactgccgcgcgcaagatcgtgcacctcaaccgccactccctgcccgccggtacagaggaagaaggcgccgaggagcacggcggcggggtcaacaccacgggcatcaagtcctcggtcatcatttgcctcatggtcatctgcgggatgctgttgggctattttgtcctcccgcagctcatctcgcccgagcgttttgaagaagtctccagcaccctgctcgtcatagggctttgcatcatgctcggctcggtgggcttcagcatgggacttgacggcagcatcgttcgcgttctgcgcggggcagggctaggcgttgtcctcgtgcccattttctccgtgattggctcgctgctcgcaggcgttgtctatgcgtttctcacccctatgacgctgcgcgaggggctcgccatcagcgcgggcttcggctggtacacgatggcgccgagcgtcatctccggctcggggcacgcggtcgcgggcgcggtctcgtttctgcacaatgtgctgcgcgagacgatgggactcatcttcctgccgctcgttgcgagcaagatcggctatatcgaagccatcacgctgcccggcacagcgtcgaccgacctgtgcctgccgctcgtcgaaaagtactgcaatcccgagaccatggcctactcgttctgcacgggcatgctgatgtgcatcacctgcgcggcgtttgtcccgattatcatcggcgcgtaaaggcacgagcctgcaacccagaaaatcaagtaaagaaggggagttctctttgcaagagaactccccttctttttcgttttcacatactattaagtacaccgcgctcactgtgctgcctctgccggacactgccgaccttcgtggtcgatggtatagtcgcacgtgagcaagatcttcgaaatcggtacgatcttatacccctcggcgagcaggtagtcgaggatatccggcagcgcctcaggcgtgtgctcgcccgcattgtggaacagcacgatcgacccgctctgcaccttgcccgtcacacgcttcgtgatctcacccgccgaaatgcccttccagtcgagggaatccacgtcccactggatcggctccatgcctatcgagcggatggtggagatgacgtggtcgtcatactcgccgaacgggcagcggatgagcgtcgggcggacgccggtcaacgcctcgatcttatcgttgcaggtgttcacgtctgcgatgatctggtcggcggtgagggaattataatgatcatgcgcgttggagtggttcatgagctcattgccgctgtccacgatggccttggcctgttcgggatactgatccgcccagttgcccacgacaaaaaaggtacaggtgactccgtactccttgagcacgtcgaggatcttctgcgtgttgtccgcgccccacgccgcgtcgaacgagatggagcacaccttctggtcgcgctggacacagtagatcggcagctggcgcgccgcggccgacgcactgacggcggcgggataattgacggcggcaaagatcgccgcggcggccagcaccgccgcgcccagcgtcagccatttgcgccggagcaccagaaagcgcggcggcttcttctccttttcagacttcttcctgcggtcaaaatgaaacagcatcagcatatcctccccaattctcttggtagagggtatgctggtgctgttcatatcatgcaagggggacgggctttactcgatgcccgccagcgtttgggcttcggcgacgtactggtcgatgaggccctgctcctgcatctcggcgatcttttcgttcaggtaggcgacaaagtcctcgttgcccttctgcacgccgatgcactggccctcgctgtcgctctcgatgccgatgtccttgaccgtcaggtcatcgttcgccgcggcgaatgcgagagctgcggtgtagtcgatgtacgaagaaaagccctctaccgttattgatggtggaaactgtgatttatacgataagggggtgtcggaatgaaatatgttgcttatcacaggacaagcacaaaggaccagcacttagacagaggaattgcagaactcaccaagtattgtgctgataatgcaatttctctgtataagggcaaggtctacacagaccaacagacaggaaagaacttcaaccgaccacgctacacaatgctgaaagatgaaattcttgaaagtggtgatgtgctgatcgtcacagaacttgaccgattaggacgaaacaaggacgccacgctaaaggaattacgattctttaagaacaacggtattcgtgttatggtgttagaattgcccacaacattgattgacctgtcagctatggaaaactcaatggctcgtatgatgttagagactatatttcctttgtggtatcgaatgttcgtaatgatgtaacaggaaattggcgaattgctaccattgcagaaaacattgaaatgcaggactacgcattggattattacaaagaatatttcaagagtgatgatgaaatccatgcaatcgtcaacttcaattacaagacaacaacaaaaatctctgttatgggtaatttgttagatgtgtctgtatatgaatatgttgacaaagaagaacatgatgcaaaactgcttttcagtggtaaacttctcaaagaatatcggcgtaccgcggatgacggtgatatagatgctggcgaacttttccagcggcttaaacttggatagccgcatgaaagcgatcaggcagccgaggatcgagccgcagaacacggtgagtagagagatgaggatggtcgttcgcgtccctcgcaggaagtattgataataattcgttgcaatttcccaaatgttcatgtgctgcggttgcctccttcgtaggactgactgtgacgctgattgtatatttatgtttgttaaatgtcaatagtaagaataacaattcatttcaagattgtagtgctgaataaagaggtgaaatagaacggaaaacgatttggtaaaaatatacacaaaagtcagcataactatgacagtcgaacatccgctgcggcacaatacggcgtgtttataagcaagcaaaaagattttgctgcatgaaaacacgcaaaaaagaaaggtgtcgggctgaaacgttcactgtttcagtccgacacctttttcataaaagtacaaaatgcgcaaatgacccctgccatccccaaatggcaggagccgtctgcgtgatcgtgtggggcgcgcacgcgccctggtatcataaagccgcgaacggctctatcatcatgcgtcgttttcgagcatccggtagcccacgccgatctcggtgaagatatactcgggcgaggcgggattcttctcgatcttgcggcggatgttcgccatattcacgcgcaaaatctgattgtcggccttggccttcggcccccagatctgcttgatgagatagtcatacgtcagcaccttgccagcgtacttgccgagcagcgccacgatcttgaactcgttgagcgtcaggtgcacatcctgatcgccgatgagcacgtggtgcttgtcatagtcgatggtcaggtccttgacggtgaacttgcccgactgcgcgatctcgttgttgtcgagcggcgtacgcgtgtgacggatggccgtgcggatgcgcgcgagcagctcgctcgtgccgaacggcttttcgatgtagtcgtccgcgccgaggtcgagcgccatgaccttgtcatgttcgtgcgtgcgcgccgaaacaacaatgatcggcaggctcgaccacgagcggacctccttgaggatgttcatcccgtccatatcgggaagtcccagatcaagaatgatgagatcagggcagtgcgaggtgatcattgagatcgcctcggcgcccgtctgcgccaccagcacgtcgaagtcgttcgcggtgagaaccgtcgaaataaagttgctgatgttctgctcgtcttccaccacgagcactttatccttcaatttcactgttgatgccctcctccagcggcagatagaagcggaagcacgctccgcccgattctaaattttctgcggtcatcgtgccgccgtgcgccatgacgatggtatagcacacagaaaggccgatgcccatgtttttcttcatatcaaagttgttgtgcgacacgccggaaagcccgccgttaaagatcgtcgagagcttctccttcgggatgccgacgccgttgtcactgatggcaaagcaggcgttcgtcccctcgcgtgagaggcagacgcggatctgcgtgacgtttccgccgtggatggcggcgttttccagcagattcataatgacctgacggatgagcgtcgcgtccatcggcaccatcagcacctcgtccggcacctcgattgagacatggatcgccgggaatcgcttggtgaacttgctgaccgagacgccgacgatctcctcggctgcctcacagtccttttcgatctttgcctgtccgccgctcatgcgcgtgatggacaaaagattttcgaccatgcggatgagccactgcgcgtcctcattcacatcctccaaaaggcggcgcttctgctcgggagaaaacgaatcctcgttttcaaggatcgcggcggtgttgccgacgatgctcgtcagcggcgtgcggatatcgtgcgacatcgcgcgcaggagattggcgcgcacggcttccttctccgtttcgatgcgcagtcgctcctgctttttgatctgcgtgttcatcgcactgatcatcatggacaccgtcagcatcgcaaggaaggtgaacgggtagccggtgatcgtgaagttgaattcccagtagggatatgtaaacacgtagttgacgaacagcacaccggagacagcgctgaatatcccccagaaatagccttccgtccagcgtgagatggtcgcgaccgccagcacgaagatgaggttcacgtagccgctgccgtcgtcgatccttcgcagcagcgtgcagagcaccgtcgccgtagccaggatcgccgccgtcagcaaaaggtcgtagatccaacgcattttttcggggatttttgccatgtcgccgccttctctcgcttgatcattggcgcggagaaagactccgcatgctttccgtccccattatagcatacagcctgctaattttgtgctaaatcgaatatttttttcatggtagcaaaaaggacggcgcgatgccgtccctttcgctgataaaggaagaagtggaattcaaaattaaatcttgcgaatgctgacattcgtcacattcgccatgttgaagccgggctgctgggcgatcgccgccatgatggcgaccttgacctcgtcggtcagaccgtcagcgggaacggcgggcgctgccggcgcggcagctgcagcggcgggcttgggagcctcaggcttcgagaggatcttgcccatcaggatcgtcaggaagatgatgcaggtaaggcccacgaatgtgacgcccatacccatgataacaacaaatgcgctggaaacttgcatcggcggatacgctccttttatgtattctggcgctattatagcgcgcagaatttgcatatcaaccgtttggaagccctcttagcattggcttaacgcgaagagtttttcccttaacagcgtttttattgatgttcagtttccgctaaagataaaacagtcagcacgccgtcctttacgcggaacttaacgtcccagccgccaaagctcataccatacacgcgctcggggtcgttctggtactgcgggcgcgggtcctgcgcaagcacaccgagcagcgcctcgcgctgcccctccggcagcttttgcaggagctccggcgggcttttgacttcgatcgtcttcttcggcgacggggcaaagccgcccagcgcctcgggatgcgcatcggcatacggaaggtagggcttgatgtcatagatcggcgtgccgtccatcaaatctgcgcccgagacgatcaaaacgtcaccgaagccatcctcatgctgcacgctttcgagcttcacgcaggaaagtccgatggcgttcggccggaacggcgagcgcgtcgcaaaaacgcccacgcgctcgttgccgccaaggcgcggcgggcgcaccgtcggcgaccatgtgtcgcgcatggcggcggagaactgccagatgagccacaggtgcgaaaagccctcgatgccgcgcagcgcgtcgggattccggtactccggctcgaagacgatcttcgcgcgaagcgtggggacgagcccgctctggcgcgggatgccgaatttttccggaaagtcagagtggattctggcaatgactttcattgtatgttccatagaatgctccttttttcgcacctgacagaggtgcgtgagttttgcagcgccgcgggcgctgtatgggggtccccacctgccgtggggcgcggggcaaagggggtattctcttctcgaagagaataccccctttaaatcccccagagaaggacgaggggcgcccccctcgaccccctacattggcagtcgggcgcttgaatgactgcatgcgctgcgcaatcgggtgcggtgtacatggcttcgccatgaacctctgcgattcgtaaccgttttgcaaccgcgccttactatcgtgaggcgcgagtgacgattgcttggcggcagactgcgtgccgaatgcggcattgctggcgctcgccgcattgaggagtgttccggtagacggagattcggctacaccactacgagactggcagagcggcagcggatgataggagcacatcaagtcgtatagcaacgctaacgcggcaacgccgcgcgcaggcattcccattccggaagcacaaaagtcattcgagcccgaaactgccaatcaaaagtctttctcttggggttccaaaggggccgttctcttttgcgaaagagaacggcccctttgcccccgccgcccgcaggcggcataccccctcgcacttgtgcgaagaaagggagcattctctcacgtgagagaatggccccctttcccgcgttccccacgtcaggtgggggaattttctgaaaaaagttctgaaattacttcagcttcatcggcgtgagctggagataatcgtccagcgtgccgtcatgcaggcagcaatcgataatctcgcggcccagcgggtcgagatcgtcggagatgaactgctggagctgctctttgaagaagtcggtcaggatcttggcgccggcgtcgtagcccgcgttgccgagcttggactgcgtctcggggcgcaggaacgtctgacggatgaactggccgtcgagcttcatttcatcgagcgcgtagccgaacagcgggcagcgcgcggggaccagatgcttttcgcgcacaaaaccgttgtggcgcgcgaggtattcgcgcgagagccactcgcccatgaatccaacatgataagcgccgatgtgctggttcgggatcagcacattcgtcgtcttgggcgcggacatgatctgctcgagcagcagattcgcctgcgtgaccttgaggcccgtggcgaacggccagtaggagccgacgccctcggccttcaggccgctgccggcgttcgtatcggcgatggacgggttcttgaagccgcgcggggagatgagtctccacagccaggcaatggactgcggcacgacctgcagcatgcccatgacgccgtagttcgggtctttcgcagtagagggcggcatgcgcacaccgaagctgcgcacgtcgacctcgacgggctcggtatcaggcacgatgttgtcaaccatcttgcgcggcaagatgacgcgcgggttggagcagggcttgccgttcgactcgatcacatgctcccagatgaggcaggtcgcaccgggcgtgccgtccatgttgaagaagaccagcggctcgctcggatggatacagatgcgctcataaagtgggctgttaccgtaggcattcatgccgtccatacgcaggaaccagccgtcctcggcatcgaggatgcgcagcttgccgctctcgggatcctggaagcttttgagcgcgcaggccatatcatcggcaatggggtgaatcttgcagctctcgccaagcgtcatgtaatatttttcgcccgtgaccgtatgcgtaccgatgagcaggcggtcgtcctcttcgcggtggaagtcctcgagcatttcgctcttgccgccgccggacgcgccctcgtgcatgaacacgacctcgcactcatacggcgtctcgaccatggccgcgcttgtgtggcagcagacccagccctcctgctcgccgatgtcgagcagcagcgagaaaacgcccttcttggcgctggggcccggatagaggttataggcccagacctcgtgcatctccttggagcggttgtgcacgacgacctgcttgccgtcaaagtgcgtgtggcggaacggcggcgcgacaaagatgatggcgcggggcttatagtgctcaggcacatcgacaatgctcgtaaagccctgcatgttcgccagcgacagcgcaaagaacgcggcgttgagcgggcagatcatcaggctcggatagccgtggccgcgcggaccggcggaaaacggcagcatgatgacctgctgcgtggagagccagtcgagcgtctcctgacgaagggacgaaaactcgtagccaaagcggtccttgaagcgcggtttgtcggagggcagatcgtcgccgatggccatactgttcgggtcgcggcggcgcatgtagtcttccatgaagttgacgacgcagccgttcttgcagcgcacgacctccgcttccttgaccgtgccattgccctcgatggggtagaccacgtcgtagcgggaggtatgcgtggggccgtaggccatctcctcgagctccgccttcgtctcggcataggcgatgcacttgcactttttgagtgccgcggtgatctcgggggctaaatcgaatttttcaaaatactggtcaaacatgaaaagatccctccacatctcattggggtttgatgattgtttattcgctgcgggactttttcatgccgcatgtcttcggggaaaggacactgctgcggcacaataaaagattgaggtaatgctatcacgattgatagaaaaacgcaataaaacatccttgaatgttttagaaaacatggatgatttttcaaaatagttaaataaacaaaaagaagacgctctgctgcgcaaagcgtcttcgcgggaaaaccgaaaggatttacgagatctttctgagaaaattgccgccgatgcgcacgccctcctgcacgatgaaaaaggcgtgggaatcgagctcgcgcacggtctcctgcagctccgcgacctcaaacttcgagacgcagacgcacaaaacgcgcatgtcgctctctgtatatgcgcccttgccctcccagtacgtcacgccgcggccaaggcgcgacatgatgctgcgcgggagctcggggtctgcgtcccttgtgaagatgagcacctgcacattgatgttctgctggtgcccgcggtcgatgaaaagcgagcagaacaccgtgtagatgacggagtagatggccgtctggatgtcgaagagcagtgcgcaggcgacgtagagcacgatgttgaagcccagcgaaaaacgtccgacggtgaagcggctgccgcgctttgtgaggcacagtccgacaacgtcgagcccgccggtcgagcagccgcaggtcagagccaagccgagggcaaagccgcacagaatgccgccgacgaggcacgaggcgagaggatcgtccaagatcggcacagcgggagattgtatcacgctcaaaaagagcgacgacgcgcccacgcagatcagcgtgcggatcaaaaacgcgcgcccgaggtcgcgccacgcgagatacagcaccggaatattgatgagaaaatacaagataccggcgatgtccacccctgcgggcagctcgacagcctgcgcgagcagtgttcggatgatctggctcaatccgactacgccgccggagtagaggcccatcggtacgacgaaaaggttcacgcccagcgcgtagaggaatgttgcgaaaaccgcgatcaggacgcgcgcccatttgttttgcagcgctttgtgcagcatagctcttgccctcacttttctccgcactgaccattattctatgtacccgtgcgggtcttattcgcttgttaccttttgattatagcccatagcggaggcacttgtaaagccttctccgcgcgcgggagagcgtgcgcgacaccgtggacttgtcccgcccgatggccgcggcgatctccgtgacggtcatgttttcctcataccgcaggcgcagcagctcgcgctggcgggcggtaagctcctcctcgcgggcaaggcgcagattgcgcttgaggcgcatgaggtcgctctcgttgtcgcccgcgtgtgcggcgatccaggcggtcatatcgccgtaaacttcattgttgcgcatactataaggtgtacttttcattgcggtaataacccctttcgtaatagtgccgcgtcagctcggccagctcgcgcgactggcgctgaagctgctggagctccaaaatgcgccgcttgagtcgctcgcgttcctccttcgtcggcgcggccttggcctgctcgcgcaggaccgtgatgcgcatgcggaagcgcagcgcatcctcgcggtagacaaacgacatctgatacagcgtcataacgtgctcgcctcccctaatatgtattcaaacgaccagagcgcttcgcgcgcaaagcgcggaaagcagtccgcgcagacggtcacgccgtttcggtaccacagcgtttctcccgcgtaaatgtcctgcgcgcagagtgagcagaccgcgtgcaccgaatcatggtgtctttttcctgcgtacaacaaaattcctccttttttcaaattccctgttgacaaacgaatcgaagtctggtaatatacaacttgttcgttgctgagatgctggtatagctcagctggtagagcagctgatttgtaatcagcaggtcgggggttcgaatccgtctaccagctccaccgacaagcaaacaatttcagatgggggaattcccgagtggccaaagggggcagactgtaaatctgttgtcagtgacttcggtggttcgaatccaccttcccccaccaagaacgagttgaggaaagtcagctcgttcttttttgttgcatgaaacgaaaaatatcgagctgcccttagactggctcgatattttctttctctctatttttttcgcgtccgtccttttcagggcggcgcgttttctttttctgctgcggggatcagccgccgtaccggtatcggcggcgtgcgccgcgggcaaactgaggagaacgctcgccgcggcacgccatcaagtacaaagaacttgttagcaaaatcaagatatcacaagaatcttgctatctcaagaataaattcacaagattcttgttataattgattgacagatacaagcttctgcgatagaatacagtcaaatcttgtcgcagcctgcgttttctgggggaattttgatgagttttggcaaacaaatgcgtctgcggcgtgaggagcttcatctctcgcgcgcggcgctggcggaggagcttggcgtttcgccctctgccatcagcaactatgaaaacggcgtcagctcgccgaaggaggaggtgctgctccggctgttcgatgcgcttgagatcgacccgaactacctttaccgcgattcgttccgctcaggcagcttcgtctgctcgcgcgcagagcaggatttgattgaaaagtgccgctcgctctcgccgctcgagcgcgagacggtaggcagcctcgtcagcgccctgtgcacgatgcacgcgagacaggacggtgtgggcgcgccgcgccgcatcccgctctaccgctcgatcgaggcagcgggctacgccgcccccgtgctaggtgaggattttgactacatcgtcgaccacggcgatgtgccgccgggagcggaattcgccgtgcgcatccgcgacgacagtttagaacccgtgctgcacggcggcagcgtcgcctacctcaatcacgacccgctgcatgcgggcgacgtgggcatcttctgcgtcgggggcgacatgctctgcaagcagtattaccgcgacccgctcggcgtttcgtacctcttctctctggggcgggaccgcagcggcgcggacgtcatctgcggccctgagagcggaaagcgcttcatctgctttgggcatgtgatcctgcctcaccgcgtgccgctgcccggtatggacctgtgagcgggaaaaaggcgcatttcacgcggaaaaagacttgaatcgttcacaaattctgcttataatacaggtttggaaatcaataaaaaagaaggaagcgtatttcttatgacgaaaattgacattttctccggctttctgggcgccggcaagaccacgctcatcaaaaagctgatcgcggaagcctacagcggcgaaaagctcgtgctgatcgagaacgaattcggcgagatcaacatcgacggcggctttctcaaggagtccggcatcgagatctccgagatgtctgcgggctgcatctgctgctccctcgtcggtgacttcaacaaggcgctcaaagaggtcgtggcgcagttccaccccgaccgcatcctcattgagccgagcggcgtcggcaagctctctgacgtcatcgtcgccgtgcagcgcacggtggacgagtgccccgagctcaagctcaacagctatgtcaccgtggccgacgccagcaaggtcaaggtctatatgaagaacttcggcgaattctacaacaaccagatcgaggccgccggcacgatcattctttcccgcacgcagaagctctcgcaggaaaagctcgaggctgccgccgcgatgctgcgcgagaagaaccccgacgccgccattctgacgactccgtgggacgagctggacggcaagaccatcctctccgccatcgaaagggtgtcgttgagcgacgagcttcttgaaaagatgcgccgcgagcacgagatcgaagaggccgagcacgagcatgagcatcaccatcatcacgatgagcatgacgagcacgaccatgagcatgaacacgagcatcaccatgaccacgatgaggatgagcatgaccacgagcacgagcatcaccaccatcaccacgacggcgaggagtgcgacgatcctgagtgcgagtgccaccatcaccatcatcaccacgccgacgatgtcttctcctcctggggcaaggagacgccgaagaagttcagcaaggaagcgcttgaggacatgctccacaagctggacagcggcgactacggccacatcctgcgtgccaagggcatcgtgaacggcgaggacggctggctcgaattcgactacgtgcccgaagagcatgaggtccgcgcgggccatcccgactatacgggccgtctgtgcgttatcggcgcggagctcaaagagcacgagcttgcagaactgtttggagtgtaaggcatggatattcctgtttatctggtcgccggattcctcgattccggcaaaacgagctttatcaacggcattttggaggacggctttgcccgcgaggacaagacgcttctcatttgctgcgaagagggcgacgaagaatacgagaagaaggcgctcgacaacgtcaccgtcgtcacggtggacgacgaagaggagttgacgctcgccttctgcaaggagctcgaaaagaaacaccaccctaagcaggtgctcatcgagtacaacggcatgtggcagatggaaaagctgtatcgcgaggtgctgcccgccaactgggtgctctatcaaatcatgacgttcgtgcaggcgccgacgttcgagctgttcgtcaagaacatggggcagctcatgatggaaaagatcacgaacgcggacatgatcgtcttcaaccgctgcgacaacaagctcaaagagagcctgcgcgcgcgcaatctgcgcatggtcaaccgccgcgcggacatctaccttgaggacaacgacggcaacagcgaggattacctgaccggcgacgagtgcccgttcgacatgacgcccgacctcatcgacattcccgacgacgactacggcgtgtggtacgtcgacgcgatggaccatcccgaccgctgggatggcaaaaaggtccacatgaagcttatcatgtgccactcgaagaagttcccgggcatccactgccccggccgcttcgtgatgacctgctgcgaaaacgacatccagttcgtcggcatcgtcgccaagggcgacagcctgaaggcctacaagaatcgcgactgggtcgatatcactgccacggtcaaaaaggagcacctcgacgcctatgagggcgagggccccgtgctgtacgtcgagcgcatcaccaccacgtcgaagcccgcgcaggaagtcgtgtcgttctgacgacgcgatttgcggaggtaaggtgaatcagcagcgcgcgcagcgctgcggagttttctcctgctaacccgcaggggggagcgaataaagggggcattctcttctcgaagagaatgcccccttttgaatcccaagggaaggatgaggggaaccccctcgccccccagcattgcggttttgaggcttgaagagctgctcagcctgcggaatcgggtacctgccgggtgatggttctaaacgatttgacttttttctatcttcgctgtcgctccctgatctgaatgcagtcttggtagaatcccctgccgtcgctagattttgccaaccttgctgcctccccaaagcggcatcgctgcgctcgccgcacttttaagttatcgtatattttttacgatggccatgtggtcatatccgcggcgcgccgctcgtgctgtgcaccttaccgtcgccgagctttgcgcgcagcggcggtaagtcgatgccgagcatcagtttgacgagccaggcaaaaaacagcagcactaaaatcgggatcagacacgacgtgacgagcatgacggcgagggcctcgataaagcggttcaggaccgttttgagctgcccgaccgcggcggtcgccgctccggtgatgccctcagtcaccttggaaaagaggccggaaaggccgcttttttcgctctcgtccgtctcgcccgaggtggcggactggatatcctcggtcgtctgctcggcgtttgcgatggtctcttcgatcgaggcgcggtatgtgtcctcgatcatgctcgagactttgacacccgcgggaatggcaaacgcgatggcgagcgcgaagagcagcaaatgccacgcgagctttcccagcgcggcgcgcagcttttcggaaaagagcgcagcgatgccgagcgcgcaggctgcggggatcaggatcgtgaacgatacgtaggatgtgatcgtcagcagatacttttctagaaagatggcgcagagcacgatgaggaaatagccgctcaggtcggcgagcttttcggcgatgggcgtcgcggtgtcgcccggcaggagcgtgatggccgcggacgcggcggtcgacgccgccgtcagctcaagcaccgtctcctgattttccgcgagcgcgtcgatggacgcttgatggtacgcggggtcggacgctctcttccccaccgcgaagatggaaaggagcgccgccagaacgagaagcgccgcgagcgcggccttcttagttgtcactgaatgcatagtcgcctccaaaaaacgagatggctctatcataccgaaacggcggaagatgtcaagaaagcgcggttgcggtcgcatcgccgcgcgcggtttcagtcctctccatcacgtcgaaagcatagagaagcggtatgaaaatgctaacattccgctaatttctttcgaattttttcaaattttacatacctttttcgaattctgtcttgtcacccgccttgtttttacggaaagttcgtgatagaatacagatacgacaggatcggcgaatcttttttcattgattctgtcaaaacggaagttttttcttccccgtttccggcgcgaaagcgcctgtactgatctgacaagcaaatcaagcaatgtttggcaaacctgctgaaaagcagggacgcaaagccagaggggtctaaggccgccgtgtgcggttatgacagccggttgcaaatcattcggaagggcagcgcccttcctgcaccgcccggccctctctgaaagcaaggtacaggcgggaaacctttttgccgaaaagagggcgggaatgaacatgcgacaaacattttatgagttctgcatgctgcacgaaaggacaaacttactgaaagaatgggatgaatcgcgcaattttccgctcacgccggacaccgtttcctacggcagcaagaaaaaagtctggtggacgtgtgaaaacggccattcgtggcagacgacggtgcatgtgcgctccgaggggagcggctgcccgtactgtacggggcgaaaggtcctgcccggcttcaacgatttggaaacgctctatcccgacgtggccgcgcagtgggaccgtgagaaaaacggcccactttcgccgcgcgacgtctccacgggctcgaagatccgcatctggtggcgctgtccggtggggcactcgtggcagtcgcccgtcgcctcgcgcacggcgtgggggcacggatgccccgtgtgcgcgggcaagacgatcgtcacgggcgaaaatgacctcgcccacctccagcccgagattgccgcacagtgggacaagcgcaaaaacgggcgattgaagcccagcgatgtcgccgtcagttccaaccgtcccgcttggtggcgctgcgagctggggcattcctaccgcgccacggtcgcctcgcgcacgcagcgcaagaccggatgtccctactgcgcgggacgcaaggtgctcaagggcttcaatgatctcaagacgctctgccccgacattgcttcgcagtggcatccgtcgctcaacggcgcgctgacgccggagatggtcacacccggcagcaacaaaaaggtctggtggcagtgctccatgggacacgtgtggaaatccgtcgtctatccgcgcaccggcgcgcagcaatgcggctgccccgtctgcgccggcaaggtgagcacaacacacgcgcggcgttacgcccagctcgatgaaattcgcacctttaccgagctgtgacaagaccaattctataaaaacgatcaaggccgcggaaagcacatcgctttccgcggccttgctttttgcctgatttggacgcactgtcagcactttgtttagtgctgacgcgttttctttcccgctttcgccaaaaagcagcgcccctctctattgcggcgaggggcggtacaatctgttcaatgagtcaacttgttgccgcaggcaaaacaaatgattgttacatgtggacacttgcgcctgatttttccctgtgctataatgcagttactttaatcggataaattacctgtaaaggagaatcatcatggattatatggctctttccgctgccgagtggcagcaggaatacgacaaggtgtccgccgaatacgagagctggaaggccaagggcctcaagctcaacatggcgcgcggcaagccgagcaagcagcagctcgaccttgtcagcggcatcctgaccgcgctgaccagcgccgaggagtgcgtggacagcggcgtggacgcccgcaactacggcgagctcaagggtcttgagagcgcgcgtaagctgttcgccgatatcctcggctgcaagacctctcaggtcttcgccggcggcaattcgagcctccagctcatgtacgacacggtctccaaggcctacacccacggcctgctgcacagcgaaaagccgtggtgcaaggaagagagcgtcaagtggctctgccccgcgccgggctatgaccgccacttcaaggtgaccgagagcttcggctttgagctcatcaccatcccgatgaccgaaagcggccccgacatggacattgtcgaaaacctcatcaaggacccgagcgtcaggggcatgtggaacgtgccgaagtactcgaaccccgacggcatcatctactccgacgagaccatcgagcgcattgcgaagatgaagcccgcggctcccgacttcctgctcatgtgggacaacgcctactgcatccacgagtttgacggcgagttcgtcccgttcaaggatattctgagcgagtgcgagaagtacggcaacgccgacatggtcttcgagttcgcttccacgagcaaggtgacgctccctggcgcgggcattgcgtgctttgcgtgcagcgaggccaacatggagtacatgaccaagctcatcggcattcaggccatcagcttcgacaagatgaaccagctgcgccacgtcaagtatctccagaacaaagagcacaccctcgcgctgatgaaagagcacgccaagatcatgaaaccgaagttcgacatggtcgtcgaaacgctcgagcgcgagatcgcaccgctcggcattgcgagctggcacacgcccaagggcggctatttcgtctccgtaaacacggcccctggccttgccaagcgcacgctggcgctggccaaggaggctggcgtcgtgatgacgagcgcgggcgcgacctatccgtatggacacgaccctcttgacagcaacatccgcgtcgccccgtcgctgccgccggtcgaggagcttgagcaggcgatggccgtcttctgctgctgcctcaagcttgccgcgctggagaaaagcaagaagtaaggcatatttgcatcaaaaaagcggaccgcagtgcggtccgctttttctcatttcgattcacttttccgctttcttctcttcccgcttcaagcgccatacggcgagtgaacgcaccagaagaacattgatgagcgcaaggcgcgcgtagctgtagacgacattcagaaggaagtacggcgaaatgttgctgtaattgccgagatcgtcgagcagcagcggcatcataccgtagctcatcagaagcggcagcacaacgagcgcgatgagccaaccggcaatgagccatgtgccctcttttttcgtcgcgggcagcctgagcattcggtaggagcgcgccgtgcagacgatcatcacaagcatgccgaagaactgcacccacgagatcgcaaggcgcgcatagttcatctgcgccgtccagaggtgcgtcataaaggcagtcgtccacgaaaggcccgtcgcaaagcggaggtagagatcaatacagagataggccgcccagccgcaccacaggcccgtgcgatacttcaccgtaaagcagatgatgccgcagaggaaaaacggcagtccgtaaatcagccccgccagcagatcgccggcgagtatcaggcaggtgagcagaagaaccgcgccgatacacaataaaatcgtacccgcaatggtgtgacgcttttcctgctcggacgaagtctgcggcgtgaaagaggcgggtactgcctgtgccgcgggcgcggctgtttccgtcttcggcgcgtcctcgccgcgcaccagctcgtcaagcgtcacaccgaagagctcggagagctttaatagcttgtcaagctcggggatggaggcgtcggtctcccatttggatacgctctggcgcgagatgtccagcgcgtcggcaaggtcgccctgcgaccagtttttctgtgtgcgcaggcgcacgatgttctctccaagtgtcatgtgatggggttctcctttgcagattttctgcgttcagcttaccaaaaggcgtgcaaaaagtccaccaagcggggttgaaaagttagcaaccagcggttgcagctcaaaaaagaggccataaatggcctcttttttgaaaaattttcgctgcgctttgtgccttgccacccggagggtggctgcgacacacgcttcgcgcaaagtatttttttcacgcgcaggtcgcgacaaaaaataatcaaaaccattttgcgcccgcgggcgcaaaaaaattgagatcgttttttctgacgacatgcgcgtcagaaaaaactcctctcgctccgcaaacgtgcgcgcctacggtgcgtgcgctgccgcggagcgagatccttttcaaaaacaaagagcgcctttcggcgctctttgtttttgattaaaattcgtagtctacggccacacggtcggcgcggatggacttgcagatatcgctcacggcaacgtggcggggatcgaccttgtaggcgttcaggtcatccatcgtctcaaactcggagacgagcacggcgtcgtagttgtccttgccgatattctttgcgacttcgcactttttgagctgcgggatcacgccgtcgagcgcggcgagcttcgtcagaaactcgttggccttttcctcggtgccctcgcggaacttccacattacgatatgacggatcataggtatcttctcctttttatctggcgttatagacctcgatggcctttttgaggatatccatggcgcgctcgagcttgtcgctttcgaggacgtaggccatgcggacttcgtttttgcccttcccgggcgtcgcgtacatcgagcctcccggagccatcatcacggtctcgccgttgtcgctgaattcctcgagcagccattgctggaacttatcggcatcgtcgaccggcagcgcggccatcacgtagaacgcgccacccggcacgtcgaacaccacgccggggatctcgccgagcttgcggcagagcgtgtcgcggcgcttcttgtactcgtcgcgcacggcggcaaaatactcggggccgacggtgtagagcgcggcagacgcgatctggtcgagcgtcgcgaccgaaagtcttgcttggcagtatttcatcgcgtggttcatgaactccttattcttggagatcaggcagccgatacgcgcgccgcaggcggaaaagcgcttggagaccgtgtcgatgacgatgatgttgtcacccgccctgtcggcaaactcgccaaacgactggagcttctccccgctgtagacgaattcgcggtacgcctcgtcgccgatgaggaacagatcatgcttttgtgcgacatcgacgagcatctccatctcctcgtggctcagcacaacgccggtcgggttgccgggatttgtgaccatgatggcgcgcgtgtgctcgttgatgagcgactcaatcttctcgcgctcagcgtagcgatacccctcctccgggcaggtcgggatcgggcgaatcgatgcaccgcaggtgcgggtcatcgtgttgtagttggggtagaacggctcgggaatgagaatttcgtcgccgtcgtcaagaatgcactgcagcgcgatctgaagcgcttcgctgccgccggcggtgacgtagatctcgcccttgtcgaagtgcatgtcgagcttgtcgtagtagttctggatcgcgtcgatcagctcggggatgccgggcgagggcgcgtaggccagcaccggctgctcgaagtgacggaccgcctcgaaaaacgcgggaggagtctgtacgtcaggctggccgatgttgaggtgatagatgttgatgccgcgtgccttcgccgccaccgcatacgggtggaacttgcgcatcggagacaggccgcatttttcaactttgctggaaaatttcatgttgtgctcctccttttttattatgatgaccgccggtcatccgccggtcatattcaatacacgtatgatatcagtccaatgctggttatatagtataacggctgcacttttcaaagacaactgaaattttgtcggtaaactgcataaaatatcacgggcagaaattgtcaacactcacagcttttccgcgtcgctctcgccatatatggtgataccgtgtgccttgagcgcctccgctgtcacgccgtcgcccgcgatcaggcggcgggaaaaagttccgtcgtaaatctgcccgcagccgcagctcgggctcttttccttgagcacggcagcctcgcagccgttttgctggcacagcgcgagagctgcctccgcaccgcggcggtacgcttctgtcacatcgcggccatccgctgtgacgacacgctcgccccgccgttcgctgggcacacgcggcgtcgggagaccgccgagctgttcggggcagacaggaacaatttcatattttcccaccaacgcctgcacgcgcgcgtccgctttactttttccgtcgtagcggcagggcgtgccgagaaggcaggccgacacgagcagcttatccatgccgcacctccaacgctttcccgttgagcttcgcctccgcgagcgtttcgccctcgtaacgcagcttgagcgagaaaaacggtacgttttcgtcgagcaggcgcaaaaagatcttgtcgccctcccacgcgggcagcgccagcagatctttctttttgatccacgcaagctcgccctcatcgcagtccttgagcgttccctcaaagccgtcggcagtgaaaaggtgcatgtactcgctctcccacttgtccgacacgaatgtcacgatgccgcgatagcggtaagaggtcagggtgaggccggtctcctccttcgtttcgcgcagagcgcactcctccgggctctcgccctcttcaaacttgccgccgatgccgatccacttgtcgcgattgcagtcgttctcctttttcgtgcggtgcagcatcaggtattcgccgccgcattcgatataaatgagcgtcgtgttcacggcgcgatagatgctactgctcatgatactccctccccaaagggtctttttgtcagtataaaagatggcggcaaaaattgcaagtgaaggcgccgttcagaaaatcgcgcatttttcgaatttgtgcttgactttgctgtgatttttggtataatcatttttgctgtcgagcgcaccgatacgcagcagtatcgaagcggtcataacgagcacgactggaaatcgtgtgtacgtcaaaagcgtaccgagagttcgaatctctcctgctgcgccaaaaagaacaccacccaacagggtggtgttcttttttgtatccagagattcgaacagggcatgagcaaagcgaaaaaacgccccagtggggcgtttagtgcccgcctacaccgtcgtggcatcacgatcgacgcgacttgcccagtcccgtcgatcgtgccacttcctcgaaagcggctcactttctctgccactggcagcgtttcgccgctttccgtgtcgcggtgtggtaacaccgcgagcgaatctctcctgctgcgccaaataaaaccaccatctttcgatggtggttttattttttactcagcgctctcagcgaactgggcttttctccctttactcccccagcatctctcctgcggcgaggacggcgttgcgaacgcactgcgcgcagggacagaggaccttgccggtctccacgccctttaagtccttgcagatcgtcgcgccgctcttttcctgaaagctcgtaaggatgctgcgggccgtgcgcggcgtgcccttgccgtccgtcacgctgcccgcagccatcaccgcaccgatcagcgcgccgcaggtggcctgcatgcagcccatgcccgcaccgtagcctgcaccgagcttcatcagcatttcgtggtcgacgggaattttatcctcccacgcgcacagcaccgactgggtgcagttgccctttcccgcggcaaatgtttccaccgccagctcggcgcgctcttcaatcgtcattgtttctatctcctttgctttttgatccattccgacttgccggtcgtttcccctatcgtactcacaacggcgcgcaaagtcaaccgccgcgcgtgctggatttttgcccgcagccgtgctatgatggagaaaatcaccacaagaggattcccaatgaagaaacaactgaccgcatggctgctcgcgctcgtgatgctcttctcgctcgtcggctgtggcgcggatgcgccggtgcaggacaattccagcctgccgcagcaggagcagcaggatgcgcagaacgcaccgtccgaagacgccgatacgctaagcgacgacgatgcatccgcccctcaaatcgacgaggacggtacctacacgaccaaggacgacgtcgcgctctatatccacacctacggacatttaccggacaacttcatcaccaagaaagatgcccaggccctcggctggccgggcgggtcgctcgagccctacgcgccgggcaaatgcatcggcggcagccggttcggcaactacgaaggtctcctgcccgaggcggatgggcgtacctacgccgaatgcgacatcgacacgctgggcgcggattcgcgcggggccaaacgcatcgtcttctcaaacgacggcctcatttactacaccgaagaccactacgagacctttgaactgctgtacggagaggagtgacggccatgcgctttgtattagacgtctccgcctgcgagaccgctgaagacctgcaccgcgcgctcgcggagggtcttcactttcccgcgtggtacggcggcaatctcgacgccctgcacgactgcctgacggacctgcatgagccgacggagctgatcgtccgcggcgaaaccgcgctcgacgacttgctcggccgtcgcgccaacgcgttccgccgcgtgctcaatgacagcgcagaggaaaatccgaatctcaccgtgcggtttgaagaagcggtccaggacagcataaactgaattgaaaaagaggacgataagcgtcctctttttcgattctacggagaatttacaaaaacttctcccatttccgccgctttccatggtatgatgaaaataaccgattattcctgatagaaagaggagaccgccatgtcacaggtgaccaaacgcgcgctcgaggcgtcgctcaaaaatctgctgctgcaaaagcccctgagcaagatcaccatcagcgatattaccgaggactgcggcatcaaccgcatgacgttttactaccacttcaaggacatttacgaccttgtcgaatggtcatgtcaggaggacgccagcaaggcgctcgcgggcaacaagacctacgagacgtggcagcagggctttttgcagcttttcaaggccgtgcaggacaacaagcccttcattatgaacgtctaccactccgtcagccgcgagcaggtggaaaattacctctacaaggtcacctacgatctgctcgagggcgtggtcgaggagcaggcgcagggcatgagcgtgcgtgacgaggacaaggccttcatcgcgacggtctacaagtacgcttttgtcggcttgatgctcgactggatcaaaaacgacatgaagggcgatccccagcttctcgtcgaccggctcgatctcgtcatccacggcaatgtccgtgccgcgctcgagcggctgcgcatcgataaggcgtgacggtttccctgctttcatcaaaagcggcagaatgataaaactttttacagcttttcgggcggtgataagtttcttatcaccgcccgatttctgctgattgttcttttcgcaaaaccgcggtatgctttcaccatcgaaaggaaaacataccgttgattcccaaggttgaatgtgtttcgtggatcagcggtttcacagacagtttgaaaggagaaatgatttatgtattattccagcggtaactatgaagcgtttgcccgtcccaagaagcccgaaggcgtggacaacaagtccgcctatatcgtcggcagcggcctcgccgcgctgactgccgcctgctacctcgtgcgtgacggccagatgaagggtgagcacgtgcacgtgctcgaaaagggcaatttgcccggcggcgcgtgcgacggctacaagtttgagaaccttggctatgtgatgcgcggcggccgcgagatggacaaccatttcgaggtcatgtgggatctgttccgctccatcccctccatcgagacggagggcgtgagcgtgctcgacgagtactactggctcaacaaggaagaccccaactactccctctgccgcgcgaccgtcaaccgcggtcaggacgcgcacaccgacggcaagttcgacatctccgacaagggcgcgatggagatcatgaagctcttcttcacccccaacgagcagctgcaggacaagaagatcaccgacttcttcgatgacgaggtcctgaattccaacttctggctctactggcgcacgatgttcgcctttgaaaactggcacagcgcactcgagatgaagctctatatccagcgctatatccaccacatcggcggtctgcccgacttcacggcgctgcgcttcaccaagtacaaccagtatgagtccatgatcctcccgatggtcaagtacctcgagagccacaacgttcagttccactacggcgtgcaggtcgcaaatgtcgaattcgactgctctgaccccaagcacaagctggctaagcgcatcgacgtcatccgcgacggcaagaaggaggccatcgacctcacggaaaacgacctcgtcttcatcacgaacggcggctgcgtcgaaaactcctccatgggcagccagaacgagcccgccgcgtacaacaccgagctcaaagagggcggcggctgggatatgtggcgcaaaatcgccgcgcaggacccgtccttcggtcatcccgacaagttctgccatgaccccgagcagaccaactggatgagcgccaccgtcgagacgctcgatcagaagatcatcccctatatcaagaacatctgcaagcgcgacccgttcaccggccatgtcgtcaccggcggcatcgtcaccgtgaaggattcctcctggctgatgagctggaccatcaaccgccagccgcagttccgcacgcagcccaaggaccactgcctcgtctgggtctactccctcttcaccgacaagccgggcgattatatcaaaaagcccatgcgcgagtgcaccggcaaggagatctgcatggagtggctctaccacatcggcgtgcccgaggaccagattgaagagctcgcgacgaacagcgccaacaccgtgcccgtcatgatgccgtatatcgacgcgttcttcatgccgcgcgcctatggcgaccgcccgaacgtcgtgcccgatggcagcgtcaacttcgccttcctcggccagtttgccgagaccccgcgcgacacgatcttcaccaccgagtattccatgcgcaccggcatggaggccgtctatacgctgctgaacgtcgaccgcggcgtgcccgaggtctggggcagcgtgtatgatgtgcgcgatctgctcaacgccaccgtcaagctgcgcgacggcaagaaggccaccgacatggacatgggcttcatggaaaagatggccgtcaagaaggccctcggcaagatcgaaggcaccgacatcgaaaagctcctcaaggagtacggcgtcatctaaggataaaagcaagcaggatagcaaggaaataatgagaaagggcgggagctaaagctcccgccctttctttgcgctctcgcgcctatttcaccggtgcattaagtcgctcagcgcgccgtccacggcggtacccatctgctgcatggtgcggcccacgcaggtcttcatggctttgcgcttttctgcgacggtcatgccgatgatcgcgccggcggccataccggcagccataccgcgccagaatgcggtatcacacatatcgatcactcctttgctcacacgcttagtctgtccacacaagatcgcgtcatacgcggcaatttttgccgcaaatcgcccttgctgaatgcctcttttcggcctataatgaaaatgagaaaaaatgagcatgaaggagaaccatatgaccacgatttatctcatccgccacgccgaggccgagggcaacctctaccgccgcgcgcacggctggtacaacagcaccatcaccgaccgcggctaccatcagatcgccgcgctcgcaaagcgctttgccgatacaaaattcgacgccgtttactcaagcgaccgcttccgcacgatgattacggcgcttgccatctataaaacgcacggcctgccgctgcgcaccgtccgcgccctgcgcgagatcgacgtcggctattgggaggacaccccctggtcggagcttgagcgcatcgaccctgagcagctcgccaatttcagcaacgattcgcagaaatggcacgtcgacggctgcgagagctttgccgaggttcgcgaccgcatgcgcaaggtcctcaccgatatcgccgaggcgcacccgaacggcacggtcgccgtcttttcccacggcatggccatgcgcatcatcgtcggcacgcttcagggcatgacgctgcacgagatcgacaggaccggccacgcggaaaatactgccgtcgccaagctcgaatacgaaaacggcaatttcaacgtcgtcttccgcgacgacgcgtcccacctcggcgacgacatcgccaccatccgcaagcagccgtgggtcaacgacccgaagggcttcgagggcggcatttactaccgcgcttcgggcgaaagcgggcacttcgacgtgatgcacggcgaggagatcatcggcgcggtcagcgtcgaatcctgccgcggcggcgtgggcacgatcggcgaattctggctcgaggaggacgcgcagaagcgcgacctcggcgaaaagctcgtcggtcaggctctctcttacgcgcgctcgcatggctgctccatcctctcgaccggccgcatcgctaagagcaatttggtcggcctccactgcgcggaaaagtggggcttccaccccgtctgcgaggatgcggaaagcgtcacttttgagaaaaattttgaatacgatgaggaatcctgctggaagagattgcaggaagttatcgaacaatgaagaaaaagaagatcgaaaaggcttttctgccggtctcgaaggacgagatggtcgagcgcggctggtactactatgatttccttgttgtcacggcggacgcgtatatcgaccacccgagcttcggcacagcgatcatcgcgcgtgttctggaggccgagggctaccgcgtggccgtgctcgcccagccggactggcacagcgcggacgctttccgcgcgatgggccgtccgcgctacggcgtgatgatcggcggcggcaacatcgactcgatggtcgcgcactacacggcggcgaaaaagcgccgcacgcaggacctctactcccccggcagccgcatgggtcttcggcctgaccgcccgaccatcgtgtacgccaaccgctgccgcgaggccttcggcaatatccccatcgtcgtcggcggactggaggcaagcctgcgccgctttgcgcactacgactactgggacgataaggtccgccgcgcgctcattttcgacgcgcaggccgacctgctcgtttacggcatgggcgaatacgccacacgcgagattgcgcgccggctctccaagggtgaaaaggcggataccttgacagatattcgcggcacggcgtttgtgacgcgcacgcccgaagtctgcgccttcgaccatgttgagtgcccgtcgtatgaagaggtgtgcggggacaagcacgcctacgcgctcgcgacgaagctcgaatacgaggagcacgaccccatccgcggcaaagcgctctggcaggcgcacgggcgcgacacgctcgtcgtcaatccgcccgcgatgccgctttcgcgtgaggagctcgacgaggtcgccgagctcccctacatgcgcgaggtgcacccgatgtacgacgctctcggcggcgtcgccgccatcgaggaggtgcgcttttccgtcgcgcacaaccgcgggtgcttcggcggatgcaacttctgctcgctggcgttccatcaggggcgcatgatcacctcgcgctcgattgaatcctgcgtgcgcgaggtcgagggcttcacccacgacccgaagttcaagggctacgtccacgacgtcggcggtccgagcgccaacttccgccatccgtcgtgcaaggatcagctgaagcgcggcatgtgccgcaataaaaactgcctcgctccctacccctgcaaaaatctcgatcccgaccactcggaatatgtcgagctgctgcgtcgtcttcgcgcgatccccggcgtgaagaaggtcttcgtccgctcgggcatccggtatgactatctgcttgaggacaagggcagtccgtttctgtccgagctcgtcaagtaccacatctccggccagctcaaggtcgcgcccgagcactgcgtggcgggcgtgctcgactacatgggaaagccgcacttcgacgtgtttgaaaaattctgggacaagtaccgctccgtgaatgaaaagaacgggcgcgagcagtatctcgttccctacctcatgtcgtcccaccccggctgcacgctcgaagacgccgtgcagcttgcggaatttctgcactccacgggtcacaaacccgagcaggtgcaggacttctaccccacgcccggtacgctctcgacctgcatgtactacaccggcatcgacccgcgcgatatgacacctgttttcgccgagacgacgccgcacggcaaggaattgcagcgcgcgctgctccagtggttccgccccgacaagaaaaagctcgtcatcgaggcgctcaaaaaggccggacgcgaggacctcatcggctacgggccaaagtgccttgtccgcccgtacggcgatgaccgcgcgatgccgcacggcaaatccggcggcggtaaaaagtcctccgccgctcagaccggcggccgcagaaacgacgcgccccgcggcgggcagagcccgaagagcagcggcgctgacaagccgaaaaactttaagcgcaaatccggctgggccaagccaaagcccacggcaaagagcaaaagaagataaaaaatgcttgcaaagcgatcgctttgcaagcatttttcttttaccgctcttatattcacttgccaggcgacagaaaaaagcccatgggtttgcaaaatccacgggctttttgacgaaatgaatcaatatacgctcactgataatcgctcagcaggaacatcgacttgatcgcgacgacctcgtcgtattcctcctgcgagacctgcacgtcggcgttgagcgccttgaggtcagatttcagcacctcgagcgcctcatctgcgctctgggcgcggccctcgcgcaggatgcggatcatgcgcgtgagcacgacagggtgcgcatagcgcgccggcagcggaaaatcgtccggcaggacgtgggcaaggttggcctgtgcctcttcccaggcgcgggcgacggcctttttgttgttcttcgccgtgggcagcacgtgcgcgccggaaaagaagaagatcgccgcaaagccgaagagggcaaaatacatgccgaaatctccgccgttgcgccacgagatgatgccgtacaccagcgccgctgcgcccgccagcacaatggccagcgcgacccagcggtaggcggggttcgtatgctggttcacgcgcttggctctggccgccttggagagctgatctgtcagctcggggtaaccggagaggaacttctgcgccttttccagctcttctttcgcgctctgcgcgtcgctcgtcagctcggaaagatagcgcgcagcctcttcctttgccttctgctccaagcgctgctcgccgccgacgctcagcgtcgggatctcgggatgcacttccccgatataggcgagcatcgcgtccacgtcttcctcgcgcttgaaggtacactgcttttccttcccgccgtcatactgcaccacgagataggggatcgcgccgaacacgcccttgcccgaaaagccgccctggctcatcgccacgcgcttgaagacgcggcacaccgacgaaaaggcgacatagtagcgccggtcgataaaatagctattcaaaaacagcgcctctttccccacgccgcaggggccgaaacgcttgcaggacttcttgtccgcggcgacagcttcggcgttgagactcatttcgccaaggcgcacaggtgcaaaaatcataaggctcctccaaagtttgaaaaagcggtgggagagcattctcccaccgctctaagaatggtttacttgtgcagggtctcgtagtgaggctcggtgtggcgcttcttgatggtgtacaggaagatgccaaggaacaagatagcggcgatgataccgacggggtaagcgaccgcagtgttgtaaacggtagcgccgtcagcagtcttggtgttgaggaactggccgaggcactcgttgcccagcaggaagtacgtcacggacacagcgctcatgaaggtagcgggaacagcggtgatccagtagttcttcttatcatagaagaggtacatggaagcggcccacagaacgatcatggcgagggtctggttcgtccagctgaagtaacgccaaatgatggtgtagtcgatcttgccgagggcgttgccgatgccgaggatcgcgccgatgccgaggacgggcacgcagaggatcagacggttcttccagctcttctgctccatgtggaaccagtcggccagaacaagacgggcagaacggaacgccgtatcgccggaggtgatggggcaggcgataacgccgagcatggcgagcgcgatgcccacgccgcccatggtcttggagcagacatcgtaaacagcggtggaaccgccgccgccgagagcgaggagctcttcgccggtgtagagagcgcagccggcagcagcccagatcagagcgatgataccctcagagaccattgcgccgtagaagacgaagtggccctgcttctcgctcttcatgcagcgagccatcagggggctctgcgtggcatggaagccggagatcgcgccgcaggcgacggtgatgaacataaagctccagatcggagtggcctgcgggtggaggttagcgaagttgttccagatctcggggatctcgtagcccttggtgaagataccgagcgccacgccgagtgccatgatgatgaggcagatgccgaacagggggtagatcttaccaatgatcttgtcgatggacaggaacgttgcgatgaagtagtagaccaagatcagaaccagccagaagagcttgctggcaaagatgccggtgctgccgcccttggtgcacagcagctggatgaggccggcggggccgacagcgaacacggtgccgaccatcacgagcagcaccacgctgaacacgcgcatgacgttcttcattgcgccgccgaggtagataccggagatctcggagatggaagcgccttcattacgctcgctcatcataccggagaagtagtcatggactgcaccggcaaagatggtaccgaaggtgatccacaggaaaacgacaggaccccaaagagcaccgctcagagcgccgaagatgggacccagacccgcaatattcagaagctggatcataaagagcttccactgcgggagaaccatgtagtccacgccatcgttgatcttcacggccggcgtttcacggtcgtcagggccgaaagtcttttcgacgatgccaccgtaaacgaagtagccgccgatcagcaatgcgaggcagatcagaaagctaaacatttttctcctcctatatttttcacaaatgtttgccttgcaggagaatttcccctgcgtttcgcctgattataataattttttggagaaaaaagtcaatcgtcaaaatgaacaaattttgaatgaatattatttcattcaagccggatatttgtttttcccttatgcgcggatgacctgctcgatggccgctaaaagctcgtcgtagccctcaaaagcgggcagatgcgggtagtcgcgcttgatcttttccgtcgtgcggaacaggaagcccgccttggacgcttcgatcatttcgaggtcgttgtagctgtcgccgctggcgatggtctcaaagccgatggactgaaggccgcgcacggtcgtaagcttggaatgctcgcatctcatcttgatgccgctgatgaatccgtcggcgtccacctcgagagagttgcagaaaatggtcggccagccgagttttttcatcagcggttgtgcaaattcctcaaaggtgtcgctcaaaatgatggcctgcgtctcagatctcagcttgtcgaggaattctttcgcccccggcagcgggtcaatgcgcgcgatagtctcttgaatttccttgagtcccaggccgtgctcgcggagcacgcccaggcgccatttcatcagcttgtcgtagtccggctcgtcgcgcgtggtgcgcgtcagctcgggaatgccgctctcgcgggcaaattcgatccaaatttcggggacgagcacgccctccatatcaaggcaggtaatatacatgtttattctcctttatcacttttccgccgcggccttgccgagcacgtagtcgagcatctcgccgcggtcgatcacgtcgcggtgacgcaccgcgcgggagcgtaggtcggcaagattcttcggcacgggcacgcccgtgaccttgtggagctgctccatcacgtcgaactcgtcgccctcggccttttcgccgatgccctcgagcacagcggcggggaatttataaggagaggcagtggagagcacgacgacggcgttgtgctcggggttcgcctgcttgtactgctgcgccacgtcccaggcgaccgccgtgtgcgtgtcgcagaggtagtggtcatccttccagaccttgccgatggcgaccttcgcgccctcatcgtcgcagaagcctgcccagaagagctcgtgcagcttttcaagcatctcggccggcacctcgtactcaccgttttcgctgagctgcttcatcagatccgcgatgagcttgtcgtcgccggagaggagatagagcaggcgctctaagttactggagacgagaatgtccatcgagggggacacggtcttgtagaaggggcggcggcggtcatagcggcccgtgcgcaggaagtcggtcagcacattgttggcgttggacgcacacacgagcttgccgacgggaaggcccatctccttggcaaagtagcctgcaaggatatcgccgaagttgccggtcggcacgacgtagtcgaccttgtcgcccggctggatgcggcccgcctgcacgaggtcggcgtacgctctataataatagacgacctgcggggcgaggcggccgatgttgatggagttggccgaggacaggcgaacgcccttgccctcgagcagctgatccttgctgacggcggagaaaattttcttcacgccggtctgcgcgtcgtcgaaattgccgcgcaccgcgcacacgcagacgttttcgcccgcctgcgtcgccatctgcgcctgctgcacggcgctcacgccgccgtgggggtagaagacgatgatcttcgtgcccggcacatcgcagaagccctccatcgccgccttgccggtgtcgccggacgtggcggtcaggatcatgatctcgtcgtccacgccgagcttttccttcgacgcggtcatcagacgcggcagcatcgagagcgccacatccttaaaagcgctcgtcggcccgcggaaaagctcgaggatgaagtcctcaccgacggggacggtcggggtcaggtggtcggtctcgaacttgccggtatagccgtcgtggacgagttttgccatctccgcttctgaaaagtcgggcaggagcttggataagatcttcgtcgacatggacatcgtgtccatatttaatacagtagtatagtcgaacttgacctcgtcaaacgacggcatcgtgtaaaggccgccgtcgggggcaaggccgtttaagatggcctgcgcgctgctggcctttaaatttttgtcacgggtactctgatactgcatggatgtttcctcctgtatctcacgggaaaagtttttttgttttccctattgtattttcacaaacgctatgttatattgtttccatcaaaaagtcaagtgtttttctttcgcggacagtttcggcgtaagtcacaaattcgtccgcacttgacggagtatcaaaaaaagaaagaaggtcattccccgtgaatattgcgctgctgggcttcggcaccgtcggttcccatttttataagctgtgcgaggggcgaactgatctgcatgttgcagcagttctctcccgccgtccccgcccggagctcacatgcaccgtgaccgccgattacgacgagatcgtgcgcgatccctcgattgatattgtggtggaagtcatgggcggcatcgagccggcgtacagctacctctgcgcggccatgcgtgcgggcaagcacgtcgtcaccgcgaacaagcagctcatgtgcgcccactttgaagagctcacctcccttgcaaaagaaaaaggcgtggcgctgcgctgcaccgccgccgcgggcggcggcatcccctggctcacctctctctcccgcgcgtccgagctcgatgagatcaaggctgtcgagggcattctgaacggcacaacgaattacatgctttccgccatgacgaattctggcgcggattatgcgcccgcgctctgcaaggcgcaggagctcggctacgccgaggccgaccccaccgcggacgtcgagggtctggacgcgcgccgcaagatcgtcctctccgccgaccttgccttcggcgtgaacattagggaagaggacatcccctgtgtcggtatctcgtccatcaccgcgggcgacatcgccaaggcgaaggacgagggcctgacctacaagctcattgcccgagcggagaaaaacggccgtgccgtggccgcgttcgtctgcccgacgcttttcccctcctccgcgcccgaggcgcacaccgacggcaccggcaacctcgtcacgctgttcgcatcgcgttttggcaagcagagcttttccggcgcgggcgcaggcggctacccgaccggctcgaacgtgctgcgcgactgtctcgacgtcgccgccggctgccgcagcttctatgctgactctttcaccccctgctcggtgaacctctccggcacgcagtgcaagtggctgttccgctgcatgggcgaatactttacccgcgagtgcagcgcccgcgaggcgttcgacgcctatgaatcttaccgaaaggacgacccgcacgcgctgcttgcgcgctacgcggccgaagaggaataaactccatgctcaaagttttgaaattcggcggttcgtcgctcgccgacgcccgccagttcgccaaggtcaagtccatcgtggaagccgaccccgctcgccgcgtggtcatcgtctccgcgccgggcaagcgcttctccggcgaccataagatcaccgatcttctctatctctgcgccgcgcacatcaagtacggcgtttcgtgcgaggacatcttcgccatgattcgtgaccgctacaacgagatcatcgccgaatgtggcctgcacatcagcctcggcaaagagttcgacgcgctgtgggacaagatgaaaaatggcatcagccaggatgagctcgcctcgcgcggcgaatacttctccgcgcggctgatggccgaatacctcggctatgagttcgtcgacgcggcccgctggatcaagttcaagttcgacggcaccgtcgatcaggacgcgtcctacgcggcgctgcgctccctcgccgaggaccgcagggtcgtcatcccgggcttctatggcgtgatgcccgacgggcacatccgcacgttctcccgcggcggcagtgacatcaccggcgcgctcgcggcggctgctctcggcgcggacgtatatgagaactggacggacgtctccggcatcctgatggccgacccgcgcatcgtcgacgatcccgagcccatccgccgcgtgacctacagcgagctgcgcgagctgagctacatcggcgcgcaggtcctgcacgagggcacgatcttccccgtgcgcgagaagaacatcccgctcaacatccgcaacaccaacgcgcccgaccatcccggcacaatgattatggaatccatcggcgacgagatggatgagggcggcttcatcaccggcatcgccggcaagaagggcttttccatcatcaccatcgccaagaccggcatttcgagtgaaccgggctcgctcttaaaaattctcaacgtgctcgccaagcacgaggtcaacgtcgagtacctcccgtccggcatcgacaacgtctcgctcgtcgtctcgtccgacaaggtgtcccgctcactctacgaaatgctgggcgagctgcaaaaagaggtgcagccgaataagataaccgtaacggagcacatcgccatcgtcgctgccgtcggccgcaagatggcgtaccgtcccggcgtttccggtaagatttttgccaagctcggcgaaaacggcgtgaacatccgcatgatcacgcagggccccgaagagctcaacatcatcgtgggcgtggaagaaaaagatttcgaacaggccatccgtgtcctgtacaatagttttgtgaaggagaatgtagtatgaaacaggtcaatgtcggtattctcggcgccaccggcgccgtcggtcaggaaatgatcaaaattctcgaagagcgcaacttccccgttgcgtcccttcgtcccatcgcaagcgccagaagcgcgggcagcaaaatcatgttccgcggtcaggagtgcaccattgttgaggcgtctgacgacgcgttcgagggccttgacattgtcctcggcgcagcggaaaacgacatcgccgagcgcttcgccccctcgatcgtcaaggcgggcgcggtgttcgtcgacaattcgagcgcgttccgtctcgaccccaacgtcccccttgtcatccccgagatcaaccccgaggacgtgaagtggcacaagggcatcatctcgaaccccaactgcaccaccatcgtgaccctcgtggccattaacgccctcgccaaggagagccccatcgagacgatcatcgcctcttcctaccaggccgtcagcggcgcgggcaagggcggcatcgatgagctcaacaatgaggtcaaggccctttccgagggcaagcaccttgagcccaaggtcttccagtatcagatcgcgtacaacatcatcccccagatcggcggcgaggccttcgagggctacaccagcgaggagatgaagatgcagaacgagggccgcaagatcctccacctgcccgagatgaaggtcagctgcacctgcgcgcgcgtgcccgtcatccgcagccacagcgtatccgtcgtgctgcgcacgaaggagaagatcagcgtcaagcgtgccaaggagctcatcgcaaacgctccgggctgcaagctcgtcgacgacctcaagaacaaggtctaccccatgccgctcgacacgtccgatcaggacatcgtctatgtcggccgcattcgtgaggacctgaccgacgagcgcggtctgaacctctggtgctgcggcgaccaggtccgcaagggcgctgccaccaacaccatccagatcgcggagctgctgctcaagtaaggctttttaaaccacagatcgttccccgttttctgccgcatagcggcggaaaacggggaattttttcgtttctgcacagaaacgccgattttggcccgcattttgctataagccgctcataaagtggtacaggcatctcataagcttgctgttaagaacgcatttgcgccggtcgttggtcattttgtcaacaaggcgcaggcatttcttgtgtgtttcccccatttttaccacaaacagcaagtttcatttgactttgtccgcggtgggggctatgctgtaagcaaggattggaaacgttaccggtaaggtttccggaatcatcgcagggggcgcgtcggcatgaccatcaaggatattgcaaagctcgcagacgtgagcgtcagcaccgtctcccgtgtgctcaatgaccgtcccgacgtgagtgaggactcccgcaggcgggtccgcgccgtcattgaggcgcaccggtatgtgccgaacaacagcgctcgcgacctcgtcaaaattcgttctgacgcggtcggccttgtggtgcgcggcgtgcagaaccccttctacaccgacatcatccacgccatcgagcaaaagctcgacgcttcgggctacacgatggtcatgcgtcaaattccgtcggacgatgacgaaattcagtgcggcgcggtgatggaaaaggaaaagcgcctgcgcggcatcatctttctcggcggacgcagtgattattcgcccgaggaggtatcgcttctcggcgtgccctacgtctgctgctcctacaccaactcctacggcacgcttccgccggaatcgtactcctccgtctccatcgccgacgagcaggaggcttaccgcgcggtcagcgagctttataaaaacggtcaccgccgcatcgccgtgttgaccgccgctcccgacgacagctcgatctcccagctccgctatctgggctatcagcgcgcgctgcgcgattttggtctcacggagcatccggaggacctgatctgtgccgaagacttcaccattgccaacgcctacgccgccatgcaaaagcgtctgcgctcccccgccgattttaccgccgtgttcgccatcgcggacgacatggccatcggcgcgatgcgcgccctgcgcgaaagcggccgctccatccctgaggactgctccgtcatcgccatcgacggcatcagcgtctcggaatacattcatcccatgctcaccaccctctgccagcccatgaccgccatgggagaggcgagcgtcgagatcctgctcgacatcatcgagggacgcggcgttcatcgccatgtcactctgccgaccgcgctgcgcgagggtgcgtccgtgcggcagctcaagcactgattttcccgcgggaaccgcgtgaaaataaatttgaaaaggagtattgatgaaatgaaaaagtatcttgcaatgatccttgctcttgtcatggcgttttctctcgtcgcctgcggcgataagaaggatgactccgctgacaacagcgacggcgatactgcctccggccgcgtctactggctgaacttcaagcccgaagccgacgagaccctgcagaaggtcgccgccatgtacaccgagaagaccggcgtgcccgtcaccgtcgtgaccgccgcttccggcacctacaacgagaccctgaccgccgagatggacaagtccgctcccccgacgctgttcgtcgtgggcaaccaggccgctgtcgacacctggggcgactactgctatgacctgagcggcaccgccgttgccaacgagctcaacaccgacgcctacaacctctatgacgccgacggcaagctctgctccatcggctactgctatgagtgctacggcatcatcgtcaacgaagatctgctcgaaaaggccggctacacgcttggcgacatcacgaactttgagactctcaaggccgtcgctgagggcatccacgctcgtgcttccgagctcggcttcgacgccttcacctcctcttccatgagcgacgattccagctggcgcttcaccggccacctcgcgaacctcgagtattactacgagtccgtggacgatcccgacgcctggaaggaatgcccgtcttccatcaagggtacctacatgcagaactacaagaacctgtgggatctgtacatcaacaacagcgccgtgaatcctgctgatctcgctgccggcggctttgacgcggcggacgagttcggcaaggagcaggccgtgttctatcagaacggctcctgggagtgggccaagctcaccggtaccggcgacggtcagtacggtcttgacaacctgtccatgatcccgttctactgcggtgttgcgggcgaagagaacgcgggtctcaactgcggcaccgagaactgctgggctgtcaacgccaaggcttccgaggaagacattcaggccacgctcgaattcatgaactggatggtcaccgatcccgaggtctcccgtatgctggttgatgaattcgccgccatgccctataagcaggctgccgagtccaccaacggcttcctcgccgacgccaacgactacaccaccaacggcaactacatcatgccctgggtcaccaacttccagccgaacgttgacgcctaccgcgctgcgctcgtctccgcgatgaaccagtacgacgccgaccagagcgatgccaactgggagctcgtcaagaccgcgtttgtcgacggctgggccacgcagtacgctgccgccaacggttaagccgcttttaaaaaagcaagcgcatctgaaaagcacaaatgagaggggcgggcgatttcgcccgcccctccctgcatatcacggcgagcgccgcatgaagcgcccgccgtgcagaaacaaaacgcaatattctatctttggctgggagttgatcgaattgaaacataagcacagcaacgctgcggtcaacagctcgatgatccgccgcccgatccgccgctggttcccgctctttatgggacccatggtctgcgcgttcatcatcggctttgtctatccgttctgcaagggcatctatctctccttctgcaaattcaaggtcacgagcgacgcgcattttgtcggccttgaaaactaccgccgcgcgttccaggatgcgagctttgtgcattcgttctggttcacggcgctgtttgccgtcatatcgctcgtgctgatcaacgtgctggcctttgcggtggcctacgcgctcacgcagggcatcaagggcagcaacctgtaccgtacggtgttcttcatgccgaacctcatcggcggcatcgtgctcggctacatctggtcgatgatcttcgacggcatcctctcgcgctacggcacgtcgatcctgctcaactcaaagtacggcttctgggggctcatcatcctgatgtgctggcagcagatcggctacatgatgatcatttacatcgcgggcctgcaagccgtgcccgaggacatgctcgaggccgcgaagatcgacggtgcgagccgctggcagacgctttggaaggtcacgatcccgaatgtgatgccctccatcacgatctgcacgttcttatcgctcacgaacggtttcaagctcttcgaccagaacctcgccctcacgggcgggcagccctataccatcctgtccgacggcagctcgatcaaagagaccgaaatgctcgcgctgaacattctcaacacgttctacgggcagaatgccaactcgcgcggcaccgcgcaggccaaggccgtgctgttcttcatcctcgtcgcgaccatcggtcttctccagctcagtgccaaccgcaaaaaggaggtgcagcagtaatgaacaagcgctctctttccgcagaagcccgccgcaagacgatcctttccatcgtgctcggcgtcatctgcgtcatctatgtgctgccggtccttacggtggtcatcaactccttcaagctcaacacctatgtcaagaccgacacgttcgccctcccgaacgcggagagctttgccggctggtcgaacttcatcaagggtctgacgttcggcaactacccgttcttaaaatccgccggctacagcttatttatcaccatcgtctcgaccgcgctgattttgctctgcacgtcgatggccgcgtggtacatcgcgcgtgtggacagcaaattctgccgcatggtctattatctctgcatcttttcgatggtcgtgccgttccagatggtgatgttcacactgtcgaagacggccgataccctcaagctcaataccccctggaccatccccatcatctacctcggctttggcgcggggcttgcgattttcatgttcgtcggctttgtcaaatccatcccgcttgaaattgaggaggcggccgccatcgacggctgcggcccgctgcgcacgtacttctccgtcgtgctgccgatgctgcggcccacgatgatctctgtcggcattctcgagatcatgtgggtgtggaacgactatctgctgccctatctcgtgctcgaccgcacgaagtacatgaccatccccatccacatccagtacctcaagggcagctacggcaccgtcgacctcggcgcgacgatggcgctgatcctgctaagcatcatccctgtcatcgtgttctacctgctgtgccagaagtacatcatcaagggcgtggccgcaggcgcggtaaagggttaacacctttcatccttcattttccagaaagaagtggttccattgatcgaacgttcctccggcattctgatgccgatctcgtcccttccctcgccccacggcatcggcacgatgggcaaggccgcctatgactttgccgactttctcgccgccgcggggcagaaatactggcagctcttgccgctcggcccgacgagctacggcgactcgccgtatcagagcttttcgtcctttgcgggcaacccgtatttcatcgacttggacttgctcgtcaaagataagctcctgacgcgcgcggaggtcaacgcctgcgactggggcgaagattcccgctatgtcgactacggcaaaatctacgcgagccgcttcacgctgctcgaaaaggccaagacgcgcggctttacgcgcgaccgcgaggccgtcgcggcatttgagcgggaaaatgagcgctggctgccgaactacgccctcttcatggcgctcaagcgccacttcggcatgaagtcctggacggaatgggacgacgaggacatccgctgccgcacaagcagcgaggtcatcgagcgctaccgcgccgagctgcgcgaggatgtggagcttttcacttacattcagtttctcttcttccgccagtgggaggcactcaaggcgtacatccactcgctcggcatccgcatcatcggcgacctgcctatctatgtggcgatggactccgccgacgtgtgggcagaacccgaaatgttccagctcgacgagcacaacgtgcccaccgaggtctccggcgtcccacctgactgcttcagcgaggacgggcagctctggggcaacccgctctacaactacgaggccatggcaaaagacggcttcggctggtggatccgccgcatcggcggcgcgcagaagctctacgacgtcatccgcatcgaccatttccgcggcttcgagagctactgggccattccctacggcgagacgaccgccaaaaacggccgctgggtcaagggccccggcatgtcgctcgtcggcgtgctgaccggctggttccgcgacctcgatttcatcgccgaggacctcggctatccctcgcccgaggtcgtgcagctgctctccgattccggtcttcccggcatgaaggtcctcgagtttgcgttcgactcgcgcgacccgagcgactacctgccgcacagctgcaatttcaacagcatttgctacaccggcacgcacgacaacgcgccccttgccctctggcgcacggaggcggataaggcggacatcgcgttcgcgaagaagtacctcggtctcaatgacgaggagggcttcaacgccggcatcatccgcggcggcatgagctgccagagcaggttgtttgtcgcgcagatgcaggactacctgggccttggcaagggctgccgcatgaacacccccggcacgagcagcggcaactggcagtggcgcatgctgagcggcgaggcgagcaaaaagctcgcaaagtccatccacgagacgacccgcatctacgggcgcctgtaaggaaaatatggcacggcggttttgggcatacgcccaaaaccgccgtgtttcgttatatttcgacagaatattacgaattgtatttatattttgacgaaaaaagagagctgggtattgccctgccctcacttttttaattcacaggagtaacagtttgctgtagtccagcgcaacgcggacggctgcgcccgcttgcagatcactttcgtgtccgacggcgatgcgtagcatcggcgcgccttcggcactgccttccggacgcaggaggaggatgttctcttccacgccggggatcatgcggcagacggtgcaggccattccgccgctttcactcagggtgacggtattgtcaggaatgccgagcgttgtaaaggccttttccgtgacagcaagcagcagtgacacgttccactcgggaagatagaccttgccgtctttcgcctcggcggcaaaaaagttcttgcagcccgcgaggcgcgccgcgctgacgctgcccggatggcggatcatttcgtccatcggcgtgacctcgccggtccgtccgttttccatcacacaaacgctgcggcagttgcggtaacactcgtcgcggtcgtggctgacccagaggatggggccgttgaacgttgcaagcaggtcggcgagctcgatctcaaggttccactttaagtagctatccagcgcggagaacggctcgtcgagcaggatcgcctccggctcagagcacaggatgcgcgcgagcgccacacgctgctgctggccgccggagagctgtgcaggatgctccttctccagtccctcgagacggaacatgcggatcttctccgccagcacgcggcgcttttccgccttgtcgccgctgcggatgccgcagaggatgttctgctctacgctcatgttcgggaacagcgcatactgctgaaagagatacccgaccttgcgctgctgcggcggcaggttgatcttcttctcgctgtcaaacagcacgcggtcgccgagcacgatgcgcccgcggtcgggcgtcacgatgcccgcgatgcactccagggtcatgctcttgccgcagcccgaggcgccgagcagcgccatcgtctcatccggcgcttcaaacttggaatgcagcgtgaacgcaccgagctttttttcaatatcgacggacaaactcatttgctcgtcctcctcgccttgctcgcatccgtgaggaagtcacgccgctcgagcatgttgaccgccagcagcacgacggcggagatcgcaatattgaccaagacccacttcgtcgccagcacatcgttgttcgtctgccagagctgatagaccgtcgtggagatcgtcgcggtcttgctgggcgtatagcccgcgatcatgctcgtcgcgccgtattcgccaagcgctctggcaaaggccagcactgtgccggccagcacgccctgacggcagtacggcatgcggatccgccagaaaatgtaggtattcgacaggcccagcgtctgtccagaataggccagcgtctcgtcaaaagactcgaacgcgccgcgcaccgtgcggtacatcagcgggaagatgacgaccaccgtggcaaagatggccgaccaccatgtcatgaccatcttgacgccgaacgtttcgagcacccacgcgccgatgacgcgcttggggccgaacacgcgcagcagcagatagcccacgaccgtcggcggcagcacgagcggcagcgtcagaagcacatcgagcacacctttgaccaggcgcggaagctttgcgatataataggcggcaaaaatgccggcaaagaaaataacgaccgtggagatcgccgcaatgcgcagcgagttccataaagggtaccaatccataagtgacctccgattttctggagtccgggagattcaggcaatctccacgccgccgcaaatgcggcggaaagtttgtgccgcatcctgcggcagggaacgggacaaaaggggatatctcttccggaagagatatcaaaaagcgtcgcagactttgcgccgcgcacggcgcaaataatcttgaaattttttgccgcgacatgtgcatggcaaaaaatacctctcacgcagcgagcgtcgaaggccgctcaccgaagtgagcggccaaggcgcagagcgtagtgcagctctttaaaatgaaagccttttaggctttcattttagtaaaccgcgctgaagccgacgcgctcaaagacggtcatcgcggcatcggtctcaagataggcgaggaatgcgcgcgcggcctcttccttttcgcccttgagcacggcggcgggatagatgacctggccgcacatctcggcggtggcgctgtcgacgaccgtgagaccggcggagtaagcgtcggtggcgtagatgatgccgcagtcagcgctggcctcgctcacctgagtggtgacttccttgacgttgttgccgtaggtcaggcagtcggtgagcgcaccctcatcaaggccatagtaggcaaaaatcttctgggtgtactggccgacgggcacgtcgctgttgcccatggcgagtatgacgtcgccgctcttgaggagttcagcgagctggtcgaagctctcgatgcccttggggttgccctcgggaacgacgagcgtgaccttgttttcaagcaggtcgatgcggctgtcggtcacgatgaggtcaaggccgtcggggttcttgtccttgtcgtcaataaggctgccatccatggcgttcatctgcttgggagcggcggagatgaacaggtcgcagtcagcgccctcgctgatctgggtgaggagcttgcccgaggagtcgaagttgtaggtgatgttgacgttgggcacgacctccttgtacatctcggcgatctccgtcagggtctcggtcatggaggcggcggcgaagacgacgagatcaacgctctcggcgttcgcatcgccttgggtgtcgtcggtggttatgtcgtcagtcttgctgctgcaggcggccagagagaacacgagcgcaagcgcaaggagcagaggcaaaagctttttcatgtttggatacttcctttcaaaaatttttctttttcgcacgttcattgaaaagcgcggcgatacagaaacgggcaagaacacgctgcacgcaatttatttccaatccccagcggggaacttggacaaaatcatttcgctattctcaaaatagataacgcaccccccaacatttcgcgcccgcaggcgcgaagtgttgaagttgtcaaaacagcaccgactcattcggttcaaaaatccaccagtcctgcccctcctaaccccgcgcccctggggcgcgaaacagcgtcgcagactttgccgccgcgcacggcggcaaataatcttgatccgttttttgccgcggtcaccgtcgcggcattacgattcccgcgcccgttgggcgtgccaatcgtgccgcttcctcgaaactggctcgcttcatccgccgctggcggcgcttcgccaatttccatgcgcgtggcaaaaaacacctctcagcctgcaagtgtgcgagcataagtgagtgcgcgcagcaggctgtccccccccccctcaaaacgttggctccgccatcgttttgaagttttattttccaaacgggcagatcggatagtggcacggcttgcacccaaggcacagcccgccctcaccgagcgccgcgatatccgcgcgcgtcacgggcacgtccgccgcgatcttcggcagcattaggtcgaagaccgtcgcgcccgcgtacatcacgcagccgggcaggcccatgacgggcataccgtcgtcaaaatagccgagcaggaacatagcccccggcaggaccggcgcgccgtaggcgatgatattcgcgcccgcggccttgatgccgcccggcgtgttgtcgtcggggtcgacgctcatgccgccggtacagaggatcatgtcgggcttcttttcgcgcatcgcgagcaccgcgtcgcgcacattctccaccccgtcgccggagtagacgacctcgagcgtttcgatgccgtaggtcttgagcttgtcgatcacgaccggcgtgaacgtatccttgatgaggccctttttgacctcgccgccggtggcgacaatgcaggcggtcttacgaacatagagcttgagagacagcagcggcttatcgcccgcggcctgctcagcctttcggagcttttcttcctcgatgatcagcggaatgacgcgcatgcccgcgagcttgtcgccctcgcgcacggcggtgccgcccttgcgcgtggcgatcatcacctcgtcctggctattcacagcgacaaggcgcgcggaatcgaccagaaacacgccgtcacaggcggccttgagctcgatcttgccctctttcacgccgctgcggatcatattctcctgcccgcagagggccagaagccgctccgccgcgtcgttttcgtgcaccatgccgggcgtcatctcccagacgtagaggtgctccttgcccatgctgagcagcacggggatgtcctcctccgtcacgacatggcccttgcggaagcgcgcgtccttatactggtccttgatgatctgcgtcatgtcgtggcagagcacatggcccaccgcgtcctcggttttgataagtctcatttcttcagcacctcgatctcgtctccagcctgaatgcggccctctttgatcacaatggcaaagacgccttcggtcggcatcacgcatttgcccgtcgtgcgcttgatctcgcagtcgttgtggcactgcttgccgatctgcgtgacctcaagctccgtctcgcccacgcgcaggcgcgtgccgacggggagcgtcttgagctcgatgcctcgggtgttgatgttttcggcaaagatacccgcgtccagctcgagcgggcagatgtcgcgcattgtgtccacgctctcgtcggccagcaggctgatctggcggtgccagtcacccgcgtgggcgtcgcccacaatgccgtggcggtattttacgtcgatatagggcacctcgtgcttgcgcacgccctttttttcgctgatgttcacagcggtcacctgtgccatttcttcattcctccgcttcataaacgccgctcttgccgccctctttatagagaaggtggatgccgtcgatgcgcatatcgcgctgcacggccttgcacatgtcgtacaccgtgagcgcggcgacgctgacggctgtcagcgcttccatttcaacgcccgtttcaccgtggcagcggacctcgctgcggatgtgcagggcggtttcttcgattccaaatgagatgtccaccttcgtgagcagcagcgggtggcacatcgggatcagttcactgttttttttcgcggccatgatgcccgcaacctgcgcgaccgccagcacatcgcccttgccgatggagccctctttgatcttgtccatcgtcgcttttgccatgcggaccgtcgcggcggcgcgcgccacgcgataggtctgcaccttttcgctcacgtccaccatgcgggcgcggccctgttcgttaaaatgcgtcagttccattctcagcctccgatcgcaaacatgccgcggtgcgtctccgtgacgccagtctcgtccatgtggtggcgctccggcttcatcagaatgccgcggcggatggcctgctccaattcctcaccggacaagccccgcagcatgatctctgcgtccgaatgcaggcacggctttaatttcccgtccgccgtgatgcggatgcggctgcactctgcgcagaacgcatgactcatcggcgcgatgaggccgacggtcccctttgcatccggcagacgatagcacgcggccacgccgtcgtgcgaaacggcctccaactccggacagcggtccaaaaccgcctgcgaggggaggtatgtaccgaaatcctttccgcagcccatcggcatgcgttcgatgaagcgcacctgccaggggtgttcgcgcgttaagtccacaaaatcggcgatctcgtcgtcgttgacgccgccgagcagcacacagttgagcttgatctttgcaaagcccgcgcgctccgccgcgtcgatgccatctaggacgtcctgcagcgtaccaagacgcgtgatggcgcgaaagcgctcctcgttcagcgtgtcgaggctgatgttgaggtgcgtgacgcccgcgtcgcgcagcggccgggcaacttctttgagcaggctgccattcgtcgtgacgcagagctcttcaacgccgggaatttctgataacatgcggcagaagtccaccgcaccgcggcgcacgagcggctcgccaccggtgacgcggatctttttgacgccgcacctgaccgccgcggcggccatgtcgcgcagcccttccaaagaacagatgtcctcgtgcgcgcacttttcaatgccgccgtccggcatgcagtagcggcagcgataattgcagcggtctgtgatgctgatgcgcaggtatgtaattgatcttgcaaagccgtccagcatctgaaacgcctctttcttccatggtacagcatgatattttagcaaatatcacgctcttacgcaacacagtcgtccgataatgtcgaactgtatttttatattatcgtaatcttgactttttccgcagtattttttagaatacaagcaacgatttttgaccgggagggccgatttatgactgacggcaacaccatccgctccgtggcgaaggcgatggagcttttgcagctcctcagcgacgcgggcgaggcgatgacgctcaccgccatcagcgagcgcgcagggctgcccaagagtacagtgttcggccttttgaccaccatgcgcgactatgacgtcatcacacagcacgcagacggcaaatacgcccttggcctgcgcctttttgaatacggctgccgcgccagcgcgttctggaacatctcgtccctcgcgcggccttaccttgagcatctggtggacgaaacagacgcctccgccatgctctccacctatgaaaacgggcacatcgtcgccctcgaccaggccgagggacgcgacagccttcgcatcgtctccgcgccgggggcgcggctgccgctgcactgcacctcgcagggcaagatcgccctcgcctatatgagcgagagcgaggcggcaaatctgctcgcccgtgtgccgctcacgccctacaccccgcacacagaaacggacgcgggtgctttgctcgcatcgctccccgcctgccgcgaagcgggcttcgccgtggaaaacggtgagtataagatcggtcttcgctccatctccgcgccggtgttcactggcggcggcgcgctcaagtacgtcgtcagcgtactggggatgttccgctccgtgcactcggacgagttcgcgcacgccgagcgcgcggtcgtcgccgcggggcagatgctttccgccgcactgggctatccgggaaagtgagacttttttccgcgcggaaaaatctacgcttgactctacaattgttatagagtttatgatgactccatgctatactgataaggagtcctttccgatgcaaaacgatctcaccaccggcagcgtctttcgcaacgttgtgtccttttcgctgccgtatctgctctcttactttttgcagacgctctacggcatggccgacctcttcatcatcggccagtttgagggtgtcgccagcacgaccgccgtctccatcggctcgcaggtgatgcacatgctcacagtcatgctcgtcggccttgcgatgggcgcgacggtcagcatcgcgcaggccaccggcggcggcgacaaaaagcgcaccgcctctgccatcggcaacacggtcacgctcttcatactgctgtctcttgcgctgacggcactgctgctcgcgctgcgcggggggatcgtctccatcatgtccacaccggaggaggccgtgcagggcacgctcgcctatctcacggtctgcttcatcggtattccgttcatcacggcgtacaacatcatcgcctcgatcttccgcggccttggcgacagcaagagtcccatgtacttcatcgccgtggcctgcgtcgtcaacatcgcgctcgactactacttcatgggcacgctgcacctcggccccgcgggcgcggcgctcggcaccacgctctcgcaggcggtgagcgtcctcgtctcgctcgcggtcatcttgaagcgcaggctcatctccgtccgccgcgcggactttcgcccgcagcgcgccgtcatgggtaagctccttcagatcggcgtgcccgtcgctctgcaggacggctttattcaggtctcgttcgtcatcatcacgatcatcgccaaccgccgcggtctgacggacgcagccgccgtcggcatcgtcgaaaagatcatcggcttcctcttcctcatcccgtcgtcgatgctctcgaccgtctcggcgctcggcgcgcagaatatcggcgcaggcaagcccgagcgcgcgcgtctcacgttgcgctacgccgcgatgatcgcctgctcgttcggcatcgcggtcgtcatcctcaccctgtttatcgccgagccgctcgtcggcctcttcacgcctgatgccgccgtcgccgccgcgggcgggcaatatctgcgcggctacatctgggacagcttctttgccggcgtgcagttcagcttcagcggctatttctgcgcctgcggcaagtcgggcatctcgtttctgcacaattcgctctcgatcctgctcgtgcgcgtgccgggggcgtaccttgcgtccaaatacttcccgcagacgctgctgcccatgggccttgccaacgccgcggggtcgcttttctccatccttgtctgcgtgatcgcctacgccatcctcacgcggcgggaaaaacgtgcgcaggaggcaacgtaaatggctcttccccagcttttctccatcggcgaaatggcaaaaattttccatctcagcgtgagcagcctgcgccactacgaggcgctcggtctcgtcacgccggaatatgtcgatccgtcgacgaactaccgctactacagcgtccgccagttcgagccgctcaacaccatccggtatctgcgcgcgctggacatgccgctcaccgagatcgctgattttctgcaaaaccgcgatgtagagacgatcgaagaaaagctgcgcgcgcagaaggctgccgtcgtacagaagcaaaaggagctcaagcgcatcgagcgcaagctcgacgcgcgccttagccagctccaagatgtgcggcatgcgccgctcggcgagatcacgctcatccattcgcccgcgcttcgccttttctggatcgacacggcgctgaccgcgccggactattccgcgctcgagctctccacgagccgtcttgccgccgcgcaggccgaggcgctggtcttcctcggcaaggtcggcttcagcgtatcgcaggagcacttgaacgagggcagcttcgggcagtacgacggcgaattcctcgtgcttgacgaggccgaccgctttgcgggcgacgtcattgatctgcccgcttcgctctgcgcatgcgtgcgcttccgcggacaccacgccgagtcgcccgcacagtaccgtcgcttgatgcagttcatccgcgaggaaggctacatcgccgccggattttcgcgcgagattacagtcatcgactacggctttacgaccgacacggaaaagttcgtcactgaaatcatgatccccctgcaaaaggtataaaaaaagttcccgcgttttatacgtgggagctttttttataccttttactcaatgcccgccgccggcgatcatcttgagggcgtggtcaagcgcgccgagcacggcgctcaggttttcgcgcgcagccttttccgagccggggaggttcaggatgaggcagtttcttctcgtgccggccacggcgcgggaaagcatcgcgcgcggcgtgatctgcaagctgtaatagatcatcgcctgcgggatcgcgggaatttcgcgctcgagcacggcgcgcgtcgcctcgggcgtcacgtcacggggagataagcccgtgccgccgctcgtgatgacaaggtcgcagtgcttttcatccacgcaggagatgagctcttcgctgattttctcctgttcgtccggcacgatggacgtgtacacgacctcgtagccagcctccttcagcatcgcggccacagcagggccgctcttgtcctcgtacacgcccgcggacgcgcggtcgctcacggtgatgactgccgcctgatagctcatagtattgccgcctttctcaaaagtcgatcgtgccctcgcgcacgcgcagatcatagggctcgtagaccaccttgcggtacgcgtccacgtcgagcttcacacccgtccagtcggaatggatctcgccagtctgcttgatgaggatatcatagaggatatcataggtcacgccgtcgtcacccgtctccacgatggtggaatagggcagcgtcttatggtaggtcatgtgcaggcccttgtagtcgaagtggtagccgttgcgcatgcggcagccgtcaaggcccttgtaggtgaagcgctttttaaggtctgccaaaatcttgtcgccctcctcctgatagaggttctcgggtgtggtttccgtgtagtcgtagcggaactgcacggggatgttgtacttgcgccagcgctctgcgtagtccacaagctcatcggcgggatagtccatgtacagcacgcagttcacgcgcttgggcgttgcgatacgggcgacgacctcgtcgggcgactcctcgacatacttcgtcaggtggcgcgagatgttgatgcaggtgatcttgtcgcgattgcgctcggtgaaagcgatcatctcctccgcactgcacccgggctgcacggggaaggtcgtgttgatatagaccttgtgggtcgtggggatggcgtcgagcatgcgctggagcgcttttaagttggcaaacggctcgccgccggtgaaaacaaaatcgcagcgcggcgtgatctcgtccatcacggcgatgctcttgaggatcgcctccacgctgaagccctcagcatgggcgtattcctgcttgttcacgcaaaacgggcagtggttccggcaatcgtagggtacaaagatcgttaccgtcgcgccgccctcgcgcgtcttgtagggatgagtcattggttcttgtccgtcctctgttaaaattctataatgaaaatagtttactctgaaatatgcaggattgcaagcgatcttctgacagttttctcattttgtcggacattgcttttcctcgcgcagaagagcgcgcacatagtcgaacgccgcgtcctcgccctgctccttgagtacgagcagcatcttgccgatgagctcgccggtctcgggatggatgaggatatggccgcgcgacttttcgtagtagtcgtaggccgaggcgtcggtatatttgtcgccctgatagaccttgcaggcggcaatgcggtcgcagaacatttcggctacatatttgagcggcattttgcacccgcccatgtagacctttccgttgtcgccgatacagtagtcgatccagtattcaaagtggtggcggttgcgccccttgtggtggagccaggcaaggctcacgccgttttcgcgccgctcggcgtcgttcgggctgcggtagccctgataatacttgacgccgcgccagaattccgaggggctgtatttgctcaggtcatgcgttaacccctgatagtacaggccgaggcgaaaacagtattgccgcaccagatggcgatgatgcgtgatggttttaaagtgctcgatggcgcgcatacggacacctccctgcgtattccggcaggccgcccgcctcggttcgccgctttcccgcgcgcgtatgtttccgtttgaagtaatacatgcacagttattgaaattttatatcaaatcaacagaaaatgcaataaggtatttttgcaaataaattgcgcaaaatgagcaccaagggcggcaagtcccctgcccttttgtctcctccgcgcgggaaagcagcgttttcccgcgcggagcgagcgtgccggaaggctttgcagaatatcttctgttatttcgtccatcacagcagaaaaagggcacggcctgttggccgcgccctttgtctgcgctttgcgaaagagccttttttacaggttcttctcgtagctctcgatcatctttttgaccatctggccgccgacggaaccggcctcgcgggaggtcagatcgccgttgtagccctgcttgaggttgacgccgacctcgctggcggcttccatcttgaacttgttcatagcggccttggcctcggggatgttgagcttgttgctgttcttgctggacataatgattttctccttttcctacaattgtttttggtttcacctgtttgaaagagttttgcggtttgggtatcgcaagggtagtttgactcataaaaaatcggatatgcagtttttctgctggtaagttttatcagcgcttcttcgcgcacgaacgctgatttgacaatcgtttttctttcctctataatttataatcaaaattgcaacatgacggaggtatttacgttatgatctcttccgataaccgccgctacgcctacggcaaatctcagctcatcgaagtcatctgccagctgcgcttccccacgatcctctcgatcgacacgcgcgagcccgccgactttcaggagaccgtgcgcgcggcatttccgcgctaccagtgccaggtggaaaagctgcccggcgtgaacggcgcgcccgcgcggacggtcaacaaccacacgttcatttccgaggacggcggctacaagctgagcctcacgaaggactttatcgccctttccaccatgcgctacacgcactgggaggactttgccgcccgtctcgacgagccgctcggccagtttatcaagatttaccgtcccaactgctttgaccgcgtggggcttcgctttgtgaacgccatttcgcgcgagcagcttggcctcacgggccgccgctggaacgatctgctccagccgccgtacctcggcattctcgacgaggacgacgtggacgaggcaagtgtcgccaagtgctcggtcgacgtcgagcgcaagctcgatgcgctcgcggcgctcaagctgcacgcgggccccggctttgtccagcgcaacatccgcagcggcaatcaggttcagcaggtacaagaaaaggaagtgcgcttcatcttcgatcaggacgtgtactccactggcaaggtaaaggtcgccgccgtggcggaaacgctcaacgccctacacgcgcattccgacagcgtcttttccgacgcgatcaccaccgtgctccacgacgcgatggagccggaatatctgtaaaagcgatgtgaagtaaattttggcaaagaaaacacatgaactggcgctgtgcggcgtactgtgcgcgctcgcggtcgccttcctctggctcagcggcgtcattccgctctcgacctacgcctggccgatcctcgcatcggctacgcttttgcccgcgcgcgaggaatgccgcaaaagctacgcatggagctgctttgccgcggcggcggtcttgggacttcttctctgcgcggataaggaagcggccctcgttttttgctttctcggctattatcccctcgtgaagccgaatcttgacgcgatctcgcccaaagcgctgcggcttctggcgaagctcggtctctgcgccgtgagtatgggcgtcatgtacgcgctcatcatctttgtctttaagctccccgccgtggtgcaggagttttccgagagcgcagcgtggctgctgtgggcgacggcggcgatggggctgctgctctttttcgtctacgatctgctcatcgaccggctggcggtcgtctatcgccaccgccgtggtaaaaaggcataaatttcggcactttttgttattcatcttaccaaaatacagcatgaaagcgcggttttccgttgtggaaagccgcgctttgccgtatactgaatttgggcaattttgctcacttccattccctcccgcctgcgctactccaccttttacgtaccgcccgcgggaaatacaaaaggaggaacgttttccgccgaaccggcggtgcggcagtgtggagacctgccgtaaagcggcgcgctcaggcggctgcgaggtcctgcatcgcggaggcggcaggactgcggttcacgattatggcagaggtcattctgaaaaatgtccgaaagatctaccccaacaccgaaagcaagaagaaaaagaagaaagacgaggccgtcgaaaagaagaacaatctggagatcaccgacgaaggcgttgtcgccgtgcaggacttcaacatcgatgtggccgacaaggagttcatcgtgctcgtcggcccgagcggctgcggcaagtcgaccacgctgcgcatgatcgccggtctcgaggagatcagcggcggtgagctcttcatcgacggcaagcagatgaacgacgtcgcgcccaaggaccgcgacatcgcgatggtcttccagaactatgcgctttatccgcacatgaccgtctatgaaaacatcgccttcccgctcaagctcaagaagatcgcggagacggacgcggacggcaagacgcatctcaagaaaatgcccaacgacgagatcgaccgccgcgtgcgcgaggcggcagagatccttgatatcacccaattcctcgaccgcaagcccaaggcgctctccggcggccagcgccagcgcgtggccatcggccgcgccatcgtcagaagccccaaggtgctgctgatggacgagccgctctcgaaccttgacgcaaagctgcgcaaccagatgcgcgcggagatcatcaagctgcgcgagaaaatcgacaccacgttcatctacgtcacgcacgatcaggtcgaagccatgaccctcggcgaccgcatcgtcatcatgcgcgacggctacatccagcagatcggcacgccgcaggaggtcttcaaccatccggcgaacctgttcgtcgcgggcttcatcggctcgccgcagatgaatttctttgaaaactgccagctcacgaagactgccgacagctatacgctcaccgtcatgggcgagaccgtcacgcttaccgcggagcagagcgcaaagctcgccgccgcaggcgtcgagagccgcagtgtcaccgcgggcgtgcgccccgtgcatatcgcgctcggcgagagcggcatccctgccgaggtcgacgtcagcgagctgatgggaagcgagctgcatctgcaccttgccgcgaatgggcaggatgttgtggcagtcattcccaccgcgaatattgatccgatggcgtatgcgcggcatacggcggtgaagtttgggtttgatgccaaactggtgcatttgtttgatgcttctactgagaagaatctcatttgatttttggaaaatttcccttttaagggaagaatattgcagcccaaggtctgcgtgaataaagggggccattctctcacgtgagagaatggccccctttgacccccaagagaacgcgaggggagctcccctcgccctccgacatcgccggtctggggcttgaagagctgcacacgctgcgcaatcaggtgcagtgtacatggcttcgccatgaatccctgcgattcgacacatccagcaaccgcgccttactatcgtgaggcgcgagtgacgttacctcggcggcagactgcctgcggaatgcggcattgctgcgctcgccgcattgatgagtgctccggtaggcggaaattagtttgcactcctacaagatgagcagagcggcagcggatagtaggagcaaatcaaatcgtatagcaataccaaccgcggcaacgccgcgcgcaggcagctgcattccggaggcacaaagattgttcaagctccaaactgccaatctaaacctttctcttggggggtgcaaggggggctattctctttcctcggaaagagaatagccccccttatccgtcccctgcacggtgcaggggaactatatcattcgatggaaagctgatacttaataggcaacgccccaataaatatcagtagtgcactctttgccgcagcagacgcacttgccggtggtgccgctctgcttgaggggcatgcagcgggaggaaacgcccgcctgttccttcatcttgagctcacactcgaggctaccgcaccacttggtgcgagcgaagccgccgcggccggaggccatctccttgacctcgtcgatggttttaagatcaaacgtgttgtcttccagattcttttccgccacggtgtacatgttgtcatggatggcgtcaagcagcgccttgatctcgtcaacgatcccctcgatcttggccgtgaccttttcgccgttgtcgcggcggacgaggcagcagttgccctcggccaggtcgcggggaccgagctcgaggcggatgggcacgccgcgcatctcgtactcagcgcacttccagcccatagactggtcgctgtcgtccagcttgacgcggacgtcggcggcgatgaggtccgccatcacgctcttggcggtctcgagcacctcgggattcttatgcgcggcgatgggcacgatgacgacctgcgtgggcgcgatgcgcgggggcaggacaaggccgttgttgtcgccgtgggtcatgatgaccgcgccgatcatgcgcgtggtggagccccaggacgtctggaacgggtactggagcttattgtcgcggccggtgaaggtcacgtcataggcgcgggagaacttatcgccaaaatagtggctcgtcgcaccctgaagcgccttgcggtccttcatcatgcactcgacggtataggtcgcctcggcgcccgcgaacttctccttgtcggtcttgcggccggggacgacggggatggcgagcacgtggcggaagaagtcggcgtagcagttgagctgctgcatcgtctcggcctgcgcctcctcggcggtctcgtggatggtgtggccctcctgccaccagaactcgcgcgaacgcaggaacgggcgggtggtcttctcccagcggatgacggagcaccactggttgtagagcatcggcagctggcggtaggtctgcaatacgcgggaccagtggtcgcagaacatcgtctcggacgtggggcggaaggcaaggcgctcttcgagcttctcgctgccgcccatcgtgacccacgcgacctcgggcgcgaagccgttgacgagctcgccctctttcttgagcaggctctcagggatcagaacgggcatcgccacgttctcatgtccggtctttttgaactccgcgtccatcaaacgctgcatgttctcccagatggcgaagccataggggcgcaggatggtaaagcccttgacgctggcatactcaacaagctccgccttgcggcagatgtcggtataccattgggcaaaatcgtcttccagattcgtgatctgttctacctttttatcttttgccatgtttatgttctccctcagtttcaggatagagttctgaactgttattgtattgtttttgcgccgaattgtcaagcacaggcgcggaaaaggtgcggagcggcaacgcctttccgcacctttctgtatttttctcacaccaccgtcgggaaacggaggatggccttgaagaggtcgccatcgatggcgagcgacatcttcccaccctgcagctccgtcaagctctgcgcgatggagaggccgaggccgtttccctcggtcgagcgcgagctgtcgccgcgcacaaagcgctccatcaattcctcggcgggaatgttcagcgccgcgcgcgaggtgttcttgaaggtcacgaccgcatcgccgccggtcttttcaagcgtcagataaacgcgcgtgccattctgcgcgtatttgcagatgttcgagagcagattgtcgatcacgcgccacatcagcgcgccgtccacattgcagaagagctccttgtccggcatcacgctcacgagcgtcagctccgccgcgctcagcttgtcgccgtactcgccctcgacctgcgataaaagctcgttcatgctgcaccgcacggcgttcaccggcaggttgccggtcgtggccttgctggcctcgaccaagtcctccgtgagctttttgagcttgaacgcctgccgcttgaggacggcgaggtattcttcctcctgcgcgggagtgtgctcatgctgcaaaagatcaacgtagttgatgatgctcgtgagcggcgtcttgatgtcgtgcgaaacgtttgtgataagttccgttttgagccgctcgctcttgagctgcttgtcgatggccgcagccatgccgtcgccgatggaattcaagttctcggcgtaacgcttaacgtcccaatacatccactttgtgtccacctgcgcgtcaagattgccggcggcgagggcttcgccctccttctggagctttcgaagctggagcgagaagaggcacgcggcgacggacagcacaagcatcgtcagcagcatcgcccctcccgcgcgatttgccgcaaatataccgagcatcatgctgaccacaaagcagcccaccgccgtgcgccagacgagcgggatggcgtgcagcaaacccacaacgccgcgacagaaggcgcagagcgtccgccagcaccacttgacgatcttccagcacaggcataacaccttatagatgagcgttcccttccacagtccgcccaccttgacgcgcgcgcagaacgtcacccacgcggcaaagacgagcaccgccagcgcaaagcttatccccagcagcagcacatcgtagggcggggtatagaagctcacataggagtagacctcctccaccgccacgcacagcagtgcaatgatcgtgccgtcaacgagaagatagaggtcgaaggggatcttttcctgccagccgccctgtagctcgccgtcctcgcgccgcgccgccgtgcgggcgaggaagatgagcaggaacagctccatcgcgccaaagaggatgagcatctccagggcgttctgcccccagttttctgccttgtcgtaaaatacctttgcccagtaaatgtcgtcctgcgcgggaaggcccttcacaaggtagacatcaaaggtcttgtcaacataaacggtgctgtagcagaaggtatcaccgtcgctgacgttgctgaactccaccttatcctgctcgtccgtcacgcggaagcgaatgttgctgtagctgtctcccttggagtagatcttgtcgagctcatagtttccgccttccatggcgatatagtcgtcgcagatctcccacgtctttttgccgactgcattcaggcagaggttgctcgtgtaaaagtcccgacccataccgccgtaggagtaggcgagccccacaacataggtgaggatcatcggcacgagcgccgccgccagcaaaaaagcgaccgtctttgtccagaaattgcgtatccacgcagccttcatttcttgtcctccattttataccccagcccccacacgaccttcaggtagcgcggctcggaggggttgatctccaatttttgccgcaggtgacggatgtgcacgctcaccgacgtctccgcccccagcgaatcctccttccacaccagctcgtagatctgggcagaggaatagatgcgtcccgggttcttcatcagcagccgcaggatgttgaactcgatgggcgtgagcgcgacctcgtcgccgtcgaccgtcacgctctttttctcctcgtcgagcacgatggggccgacggtgtagacgttcggcttctcctcttccttcttcgcgcccagctgcgtatagcggcgaagctgagacctgacgcgcgccagcacctccacggggtcaaagggctttgtgatgtagtcatccgcgccgatgttcaggcccagaaccttgtcgctgctctcgctcttggccgtgagcaggatgatgggcacgttgctcttttcgcgcagcttcgccgtcgcggcgatgccgtcgagctggggcatcatgatgtccatcaggatcagatggatgtcgttcttctccacgacctccagcgcctcgcgcccgttgctcgcctcaaacaggcagtagtccccgccggagagatagatcttgagcgcgttgacaatgtcctgttcgtcgtcacaaatcagaatgttgtacattttctcacctcatgttggtcattgtatcagccgttttcaaacaaaaacagcgattgtttcttaattcttacttaatatcctctcaaaaaggccgaaaggggcttcctttcggcctttttcggttgtttccttatctttttcggtcaattttgcgataaaggcggagcgctctctccgccgcgacacctgcagcgtgcgcaaggctgcgcgcgtcataatgaagctctgcaaagcagaacgcggacttccccgccgccgcaaggcgcagggacttttcttcctttttccgccggctgtaccagatcgacatagttctcctcctcacaaatcgcgcccatcgagcgcagcaaggccgaagcgcgcggcgaggctgatcttcgcgcgctcgtcgtccgaggatgcaacatcgaatttcgtgcgcagctcacgcaggaacaggccgcgcagcgaatcctcctgcgctcgcgcccagacgtcctcgccaatgcgcgtctcatcgcgcagctccaagtggaagaagtcgggcgcaaactgctcttcgattgacttgagatcaagcccgcgctcatctgtctctccggtgaaaataatgcggtaaatatcgcgcacagtcgcatccggcaggcttgctcgcagcgcgtcctccgccgatcttcccgtcacatcgacgttcaggatctcataccgtctgcgcgcgaacggcacaaacgaaagttcggccttcccgcgctccaccgtgcccgtaaggatgcccttttcgcccagctcgtcgaaaccgcggccctccgggcagccggagtaggcgtaggtcgtctgcccttcgcgcagaaaaccgccgaactggtgtgtgtggccgagcgcaagatagtcgatcccgctctccttgatctgctctttcgtgaggggatcgtagcgcgattccgcggcggagatatcaccgtgcagcaccatcagatggatgaaatcgtcctccggtgcgcggaagcccgcaagcaggctctcatcctgcaccggcgcggtaaacgccgctccgtacacggcgcacccgagttccggcagctccacgcgctcgaccgtcttcgacgtgaagatgtgcacattctccggccacgcaagcgtcgcgtagggcgacttcgcgctgtacgggtcgtggttgccgggggcgatgaacactcgcgcctgcattgcgcccagcgcgtcggagagcgcttccagcgtctcgcgataggtcgtgtcgctgtcgaacaggtcgcccgcgagcagcacgagatcgacgccgttctgattcacgtaattgcaaagccgcgtcagcagctcgcggctctcgcggcggcgctggcgcgcctgctcggcgctcagcgcgccgaacgcgctgtccaaatggaagtccgccgcgtggacgatcttcacgctcatgtgttctctcctctcacgcctgcggggcgggcgctttctccttgcacacgtcgacccaggcgacaaagttcgaggaatacttctcaagctcgtcgcaggtcatctcgatggcgctgttcgcgctgcccgccgcggggaaaaccgtgtcgaagcgtttgagcgacacatcgagataggtcttcacattctccggcagtgcaaacgagcacacgccgcccggcgcgtggccggtgaatgcgcaggcctcgtcaaaggtcagcatctttgctttcacgtggaaatacgccttgtacttggcgttgtcgatcttcctgtcccccgccgtcacgatgatgatgggctcgtcgtccgcgagcttgaagctcatggacttggcgatacgcgcgccctccacaccgacggcgatggcggcgagttcgaccgtcgcactcgacacgtcgaactcgcggatgcggccggcgatgccgaagtgttcaaaataggctctcactttttcgatggacatttgcgttgttcctttctattttgcgctttttcagcgcacatcgacgcgctcgacgcccacgcagagccccgtcgcgtcatccaatgtaaaaatcgctccctgcatcttgccggcgctcttctccggctcgcggtagcggcccgggagaccgccgagaaacgtctcgaccgactgctcgggcttgataccgagcacgctgcgcaccgcccccgtcatgccgaggtccgtgaggtagcccgtccccttggggaagacctcttcgtccgccgtcggcacgtgggtgtgcgtgccccagatggcgctgacgcggccatcgaggtaataggccatggcgagcttttcgctcgtcgcctcggcgtggaagtcaagcagcgtgaacgtcggcttttcgccgcttttgagcagctcgtccgccgttttgaacggattgtccgcatggaacgcgaggtcgcagcggccgatgaggttcatcaccgcgatgcgggcgcgcccgcagtcgaaaacgccgtagcccctccccggcacgcgcgcgccgagattgtgcggccgcagaatatacgggcagtcgtcgaggtagtcggtgatctgcatcttgccgaatgtgtggttgccaagcgtgatgacgtccgctcccgcggagaagatgcgctcggcgtcgttcggcgtcaggccgaccatcgcggcattctcgccgttgaccacggtgaagtggatgttcttgagttttttcacggcgcgcagatggcgctcgaggcagctgacgccgcagccgcccaccacatcgccgatggccagaatattgtagagcatggcgttcctccgctttgcgttttccccagtatagcaaggcgcgggacaaaacgcaagaaaggcatgaaaaaaggccccgcaaaagcggagcctttttcttatttcgcgtattcgatggcggtcgtctcgcgcaggacgtgcaccttgatctggccgggatattccatctcttcctcgatttttttggcaagctcgcgcgccagaatgaccatctggtcctcgctgacctggtcgggcttgaccatcacgcgcacctcgcggccggcctgaatggcataggccttgtcgacgccgggatagctgccggtgatctcctcaagctgctcgaggcgcttgatgtagttctccagattctcgcggcgggcgccgggacgggcggcagagatcgcatccgccgcctgtacgaggcaggcaacgatggtctgcggctccacgtcgttgtggtgcgcctgcacggcatggatgatgtcgtccttttcgtggtatttgcgcaaaaattcaacgccgagggcgacgtgcgtaccctccatctcgtggtcgacggccttgccgatatcgtgcagcaggcctgcgcgcttggcggcgtaaacgtccgcgcccagctcggcggccatcatgcccgcaaggtgcgagacctcgatggagtgctgcagaacgttctggccgtagctcgtgcggtaatgcaggcggccgagcatcttcacaagctcggggtgcagaccgcggatgccggtctccagcacggcgcgctcaccctcagacttgatgatggcgtccacctcgcggcgggccttgttgaccatctcttcaatgtgcgtgggatggatgcggccgtcggcgatgagcttttcgagcgccaggcgcgcgacctcgcggcgcacgggctcgaagcacgagacggtgatcgcctcgggcgtgtcgtcgatgatgaggtcgacgcccgtgagcgtttcgatcgtgcggatgttgcggccttcgcggccgatgatgcggcctttcatctcgtcattgggcaggggcaccacactgacggtgatctcggcaacatggtcggcagcgcagcgctggatggcagaggcgacgatctcgcgggcgcgggaatcggcctcgtccttggcgcgctgctcaagctccttgatcttgagcgcggtctcgtgcgtcacttcgctctcgacctgctcgatcaggtacttcttggcgtcttcggcagtaaaaccggaaatgcgctcaagcatttcggtctggctgcgcttgatgatcttgatttcttcgttttccttgtccagagcggcatgcttctggttgagagcctcctcgcgcttttccagcgcgtcggtcttgcggtcgaggttctcctccttctgctggagccggcgctcctgcttctgctgctcggcgcggcgttccttgacttccttctcgtattcgtttctggagcgcaggatatcttcctttgcctccaacatgacttcgcgtttcttgttttcagcgctcttgatcgcttcgttgacaatacgaagagcctcttcatcggcgttggagatcttctcctcggcgcgcttagcggctctcttgcgaatccaaataccaagaagaatgccaatgacgagcgtccccaccgcgataagcgcagcgtagagatagctgatcatgcgattcctcctgtgtgctttttttgatcgatgcgattgatctatcgttgggtttttgaatcataaacgggagattccccttctctcccctccataaatccaaaaaacattgtaaactttttatgaccagctgtcaaggaaaagtcgcgttcggaaaatatcggaaacgggcgaatgtcacaccgcgatgtaggcctgcgccgcgtagccgagctggtcgtcgtagcccacggagtaccagccctggaagctgccgtagacctgcacgctttcgccgttcgggatgctgccgactatttccccgtcgatgcccgggtagcttcgcaggcgcagcgccgatccctccgtcgtgacgacgccggtgcgcacgagctgcgggtaaatgaacggcaggccgaaatactccgtcagtccccgcgcgatggcctgcgccgcggcgtcgaggttattttcgatccagcgcgcatcgtcgtaattgtcgtgatagccgagctcgatgagattcgcagggtatctgggccgccgcacctcgcccagcgtcgtggtcgcctgcgtcgtcacctttgcaggcagcgggtagaccatgcgcagctgcgcggcgaagagctcggcagcacgctttccgtcgctgctcgtgggatagtaaaagacgatgatgccgcggttcttccccgtctgcccctcccccgaggcgttggagtgcagggcaaggtaaaagtcaaagccgccgaggctgttcgcctgcgcgatggacgaggccgcggtcatctccggcgtgttgcgcacaaaggagatggtgtttgcgtaaaggtacggctcgagcgtgtcggccagcagattcatccagtattcctcgctgccgctgccgtcgacatacgggttccaatcctgcgtggagggactcaaataaattctgggcatgtgcaaaacctcccgtcgtttccagcttatgcttgaaaagcggcgcacatgcaaaaaaagagaccgccgaagcggtctcttttttgattgataggatgctttgcgttacacggacgcagccgccttgtccttcttgttctcgatacgctggagaacgaggacgacgaccagcaccgcaagacccgcaaggtcggtgaccgtgccggggatgaccatcagcaggccgccggcgaccagcgcgatgcggctgatccacttcatatcgcggatcaggtagcccatcaggccggaggcgatagacgccataccgagggtcgcggagatgacgacggaggcaacgctcaggaagttgacgtcggtgccaacgaagatcaggtcgttattgtaagcaaagatgtagggaatgatgaacgccgcgatggcaagacgggtcgcgttccaggcggtcttcatcggaggagccttggcgatggcggaaccggcgtaggcagccagcgcaacgggtggggtgatgtctgcgacgataccgaagtagaagcagaacatgtgggcagccatcagttcgagacccatgccggaggcaaggatcggcgcgcaggtggtggccatgatgatgtagttcgcggtggtgggaacgcccatgccgagcacgatgcagcagagcatcgtcagcacgagagcgatgatcaggtgaccgttggacagaccgacgatcgcgccgatgagcacctggccgagaccggtcatggtgacgacgccggcgatgataccagccataccgcaggcgataccgacgctcaggcagttcttgccgccgttttcaaacgcgtcgatgatggtgggcaggctcttgacgttgggcttgctgatggcgtagttgataaccagcagcgcgaaggcgatggcaaggcagagcgtgctgccgttctcgcccatgaaggtgcccggctcgaagctgcggctcatgagggtcatgaacagaagcgggatcagggggatggccatgacgagcttcttcttgccctcttcacggctgatcatggcgacgaccacgcagtaaagggtcgcgtacacggcggcggtggccatcgtgaagccgatcatgatcatgtagaccagaacgaccagcgggaggatgaggtagatctgcgggagcaggatcttccacttggggagctcttcgcggggcaggcccttgaggccgagcttcttggccttgaagtgcacgccgaggaagatgccgaggaagtacaggaatgcgggcagaattgcacgcacgatgatatcagcatagggaacgccgaccatttccgccatcaggaacgccgcagcgcccatgatcgggggcatgatctggccgccggtggaggacgcagcctcgaccgcgccggcaaactccgggggataaccggtcttcttcatcatcgggatggtgacggaaccggtggtaacggtgttaccgacggaggaaccggagaccatgccgcagagggcagaggaaacgaccgcgacctttgcaggaccgccggaagcccagccgaccagcgcgttcgcgcagtcgatgaagaagtttgcaacacctgtggcctccaagaaggcgccgaagatgacgaacagcgcgatgtaggtcgagcagacgccgatcggggtgccgaggataccggtcgtggtgtagaagaggttatacataacggtctttaagtccttgcccgcgcctaagaaggcgtagagcacgaacaccgtcgccacgcagatgatcggcataccgaccacgcggcggcagcactcgacgaggatcaaagtgccgatgattgcaaatacgatcagaagggggatggaaacgctgccgatctgcacgacaaaggccttctggattcgcgtaccggcagacacgattttttcaaggtttaaggggtagaagaagaaacagaacgcgccgactgccgccatgacgatatcgtaccagggcatgtagttgaccttctgagaacccttcttgatggggtagtagataaacacgagaatgatgaccaggccgaggaagagcggacggcgcgcacgctcgtccatcttgatccacatgttcatcacgatcaggaaaatgccgaacagtgccgtaaggacacgcaggatctttctgggagtgccttcccagacgcgcgtgttcgactcacggtcgtactttttcatgatcgcatcgacgtcttccatggtgccgacgtcgttgtcgactgcaacattgttgagcttttcattttcagccatgatgcaatttcctcctaattctatttgagagcgtccgtgcgctcagacgagccagaattcgtaattaaaacgcacaggcgcgttttttccacacaaatcacgcagactgacatcctcgccgtttacattgagtacatggtcagagaccgtaccgacaatgtagccgacgtttgtcctgtcctgatggatgtttcggatgaccattgcccagcccttgtaatcggggcggtccacatagaccttgtcaagcgtttcgccggggtttagctccgtctgcacgcctgcgccaaaggagcaataggtcgtctcctccacatagatcgttttgttttcgatctcgtaggtatcggtcagggggtatttgttcacggaatggataaaggtcacggaaaagcggtctccctcgcccattttgtaccgggcgtagacctcgccggtgtcgcggttgcgcagggtcagatagtagccggagcgaggaagaagcacggcggccgctgcaataatcgttattattgcagcggccgcaattatgtatttccgcagatgagaattcacgtcaatacacggtagcgatcctgcttacaggacgccgatttccttgtagtacttctcagcaccgggatgcatggtgacagtagcaccagcggaggcagcctcgggatcgaggaagccgaacttggcgtggccttcggtcagagcgtccttgttgtcgaacatggccttgacgaactcataaacgacatcctcgctcagctcttcggaagcgaccagagtagcctggatagcgacgcaggtgacgtcggcatcctgaccggtgtaggtgccggcagccaggtcgtcacggatcaggaacggataggcctcctggatggcggcgagctcatcgtcgctcagggagacgaggttgagggtgttggtggtggcatagtcgacgatagcggtcgtgggagcaccggcgacagtgaaggcggcgtcgatcttgccgtccttgagctggtcaacgccatcctggaaggagccgttcacagcattgacgtcgtccttggtcagacccgcagcgccgaggacctgccaggcgttgatctcggtaccggaaccaacgtcaccgacgcagatggtcttgcccttgaggtcggacacggtgttgatgccgggcttggcaaggatctgaacggtctcgttgtagataccggcgacccaaagagcgttggtctcgggagcaccgtcgaaggagttggtgccctcgtgcgcgtagttgataacgtcggactgcagaatggccatctgagcatctccgtcggtgatcatgttgacgttcgcgacggaagcgccggtggactcaacagagagcttggaaagggtcagcttggagtcgaggacggtcttgagaacgccgccgacagcatagtaggtaccggaggtaccgccggtcgccagagtgatcgcgacgggggaatcggagctggtgtcgccgtcgttgttctggctgtcgtccgtcttctcaccgccgcaggcgaccagcgcgaagaccatcgcgagagagaggatcagagctaaaaactttttcatacgcaatctcctttttgattcttccggcattcaccgcttcaccggcacatgctccgccgcgtgggggcgcttcggagcacctacgttggagaagcgttgaattccgaaatttacttgcctctttcaggcagtctcattataaccgcatgacaggtttattgcaagacgtttttacttttttggatatttcgccaaattatcgttgaattccgtcatcattcgaccgattatttcgttaaacatttgtcaggttttcaattttttctttaggtataaaaaatcagggcggcaaagcgccgccctgattctatgaaaggatcaaatgctaattatgcaaaatcggtatgctattatttcttttccttgttgtccacgacctgcttgagaagcgcggagaactcgtccatgctcatcgcgccgaggtcaccgtccgcgcggtggcgcggggacacagtgccgttttccatgtcgcggtcgccgacgaccaccatgtaggggaccttctccatttgcgcgtcgcggatcttgcggccgatcttctcgttgcggtagtcgacctcgacgcggaagcccatgtcctcgagcttcttggcctgctcggcgcagtagtcggcggcgcggtcggtgacgggcaggaagcgcacctgctcgggtgccatccacgtcggcagcgcgccggcgtactcctcgatgaggtaggcgagcgtgcgctcatagcagccaagagacgtgcggtggatgatgtacggcagcttcttctcgccattttcgtcgatgtagtacatgccgaagcgctcggcgagcaacatgtcgatctggatggtgacgagggtgtcttccttgccgtaaacgttcttatactggatgtcgagcttcgggccgtagaacgcggcctcgtcgatgccgacggtgtagtcgacgtcgaggtccttgaggatgcgctccatcacgctctgggcgtgatcccactgctccttcgtgccctcgtacttgttgttcgggttcgcgggatcccactgggagaagcggaacgtgcacttgtcaagaaggccgacggtgccgaggcagtacttggcgaggtcgaggcaacccttgaactcctcttcgagctggtcggggcgcaggacgaggtggccttcggagatcgtgaactgacgcacgcggatcaggccgtgcatctcgccggaatcctcgttgcggaacagcgtcgaggtctcgcccaggcgcatcggcaggtcgcggtaggagcgctggcggttcaggtagacctgatactggaacgggcaggtcatcgggcgcagggcgaagcactccttcgtctcgtcatacgggtcgccgaggatgaacatgccgtcgagatagtgatcccagtggccggagatcttgtaaaggtcgcgcttggccatcagcggggtcttggtgagaagatagccgcgcttctgctccacgtcctcgacccagcgctggagcacctgcacgacgcgcgcgcccttgggcagcagcaccggaaggccctgaccgatgcagtcgacggtggtgaagtattcgagctcgcggccgagcttgttgtggtcgcgcttcttggcctcttcgacctgggcgaggtaggcgtccagctcttccttcttcgggaaggcgacgccgtagatgcgctggagcacctcgcggttcgagtcgccgcgccagtaggcggcgttgcaggcagtcagcttgatgccgttgcccttgatgcggccggtggagtcgaggtgcggaccggcgcagaggtcggtgaactcgccctgcttgtagaagctgatgacggcatcctcaggcaggtcgttgatgagctcgaccttgaacggctcttccttttcttccataaatttgatggcctcggcacgcggaagctcaaagcgctcgagcttgagcttttccttgcagatcttgcgcatctcggcttcgatctcagccaaattctccggcgtgaaggagaacggggcgagcatatcgtagtagaaaccgttgtcgatgctcgggccgatggcgagcttcacctcgggccagaggcgcttgacggcctgcgccagcacgtgggagcaggtgtgccagtaggtcttgcggtactcgggattttcaaacgtaaactggttttcttcgttgatcttgacttcttcagacatgttatttacctccattttcacttgagggtgcaaaaaagctccacccccgatgttctcaggggtgaagcattcaactactccacggttccaccctgcttgcgcatttcgcgccgcttgtgtccgctgtaacgggcgatcccgtcccgcttgtttcgcgggcggctcaagggtggtactgccggtctcttccgcaggatgctcgcagcaaatgcatccctctctgcgcggggaaatatcggtttcttccctatccgtgccattttgatgatgggagtgtacacccgccgcgcccgtttgtcaagcaaaaagtgcgcacagtgtgcgcacttttacaataaattcatcaaaactccggcgggcggtttttgggcggcttgccgtcgtcctcgtctctgccgagaatgcccgaaaagagttttttgcgctttgcacgcctttcctcctctttttgcttctgctccgccttgtaacgctcgatcgactccagctcttcaatgcgctcgcgcgcaacagcgcgcagcatatccggattggcatcgtaaacgatcgcacgcaactcgtccatcgtcatttcctcgcaggcatcccgaaagcgcttttcgcgcacgtcctccggctcaaagaatgccatgcggccgcaccacgagcaaatgtacacttcgaccgggacgtgatccgtccagagattcgaaccgaggcttgagccgttcatctcgagggtctgcgcgccgcgatcctccatcgcgtggccgcagacgcaaagcttgtcaatcatgcgttttctcctttcggtgcagctcgtgttttgggatatcgttgtagaaagcgaatgtctcttcaaaaagcgcggcaccgtaggcgcgcagcttttcgcagtaggcgtcgtaggcggcgatcatctgccgcgcctcgtccgtcagctccgcgccgccgccgtgcttgccgcccgccgtggaggtcaaaagatggaagcccagcccgtcctcggcattgcggacgaccgtccacgccttggaataggccatggacatcgacagcgccgccgcgcgcagcgaatgcagctcgtctacgcgcttcaaaagctgggacacgccggggccaaagcatttctggtcggaaaacacacgggcggagagaacaacgcggagctcacgatccatagggcggcacttcctttctgttgtatttcattatatccaggtgaatgcggttcgtcaatacggcaaaagctaagcgggagcatgccgctcccgctttcttcactttaaggtgttgtagtgcgtattttcgccgtcgaacaaaaagccgtccgtatcgtgtacacggccgttcgacagcatctgccggtaacgcacatcgttcgagattccattgatatttgtgcctgtcaaactgcgtccgttgctgcgcagctgcgcgtttgcgctcttttccgtcttggggttcagataggtcttgccgtagaggttgccgttttcgtgcgtgatggtcttgtcgctgccaaaatagcggctgcggtcgctggcgctcgcggcggcattgcggcggtcgacgctgcgtgtcgtattctctccgtcgccgtccatgtcgtcgcccatcatgccgtcgccggtcacgctgtcgtcttttttgttttcgccgctcatgtcgtcgcccggcatgttatccttttttttgccgctgtccgccgcgccgttgtcggtcgtaccggtcgacgggccgttggcggtgttgctgtccttcttctccccgcagcccgcgagcgagaagagcagcagcgccgtcacaaaaagcatggcaagggtctgcttcatctctgcatttctccttacgttcatctcccgcgatacccaagcaatagtatgcgcacgaagcaacaagaaaccagacgtaaattttgtcaaaacgcatgtcaccgacactaactcggcaaaaagcctcgcagagtttcgcgcccataggcgcgaaataattataattatttttctgacgacatgtgcgtcagaaaaatacttctcgcccgcaagtgtggaaattgcttgcctgcggcaagcaatttctgcgcgcagctggtgtaaaaagcaaaaaaagaggacaccttacggtgtcctctttttttgagtattttacttgctcgccttcgcggccttgaaggcctcgatcagcatcggggtaaccttgaacaggtcgccgcagataccgtagtcggcgatctcgaagatcggcgcggtgtcgttcttgttgaccgcgatgatgcactcggactcgctcataccggccttgtgctggatggagccggagataccgagagcaacgtagaccttcgggtggacggtcttaccggtctgaccgacctgatggtcggcagtgagccagccggagtcgatggcaacacgggagccgccaacaacgccgccgagcacgtcggcgagctcgtgagcgagcttgatgccgccctcgacgtccttggagataccacggccgacggagacgatgtagtcagcgccaaccaggtcgacaagcttcttggcagccttgacgacctcgacgacctcggtctggagatcggcggcgtcgagcttgacgtcgtacttggtgaccttaacggccttggccttcgcctcgtcgtaagcagccttcttcataacgccgggacggaccgtcgccatggagggacggaagcgcgggcagatgatggtagccatcaggttgccgccgaacgcgggacgggtcatcttcaggtcgcgagagacatcgtggtccttacccatgaccttcgcggtggccatgccgtcgatcttggcctcgggcagcgtggaagcgccgcgcaggaagtccttgtagataggcatgtcaacgtcgaggtgggtgcagtcggcgcagagaccggtgtgcagacgggctgcgcagcgggggccgaggtcacggccgatgttggtcgcgccgatgaggaaggcctcgggcttcatctcggagatgacgtcgcagatgaccttggcataggcgtcggtggtgtagttcttgagcagggggtggtcgcagacgatgacctcatcagcgccgtagccgccaatgctctcggcgagatcgccgacattgtcgccgaccagcagaccgcagagcttcacgcccagctcgtccgccagcttgcggccttcggagatcagctcataggaggtggacatcatctggccctgacgctgttcgcagaagacccatacgttcttgaactcttcgatcttggaggagtcatagttgggattagcaagtttcacttcgttacgcatcgtattgatctcctttccttaaatgatgtgtttttcgagcaggatgccggcgagcttctcgcaggtagccatgtcattgccctcgagcatctggccagcgcccttctggggaggcgtgaaggaggtcaggatgttggtcggggagcccttgaggccgatggtggtagcgtcgatgagggggtgatccttcagggcgttgtagtccagaacggtcatgggcttggagtagcactcaaacacaccggagacgctcatgtaacgcggagtattgagctccttgatgcaggtgatcaggcacggagtctgagccttgatggtcatgtagccgtcctcgagcatgcgcttgacggtcagggtgtcgccttccttcttcacatcggcggcgtaggtgatctggggcaggtgcagcttctcagcgatctgaggaccgacctgagcggtatcaccatcgatagcctgacggccgcagaagacgatgtcgtcgtcatcgagaccgatggtgtcgagagcggcggcaaggatctgggaggtggcgtaagtatcggaaccgccgaactcacgggcggaaacgagatagccgtcatcagcgcccatggccatcagctcgcgcagcataccttctgccggcgggggacccatggtgacgacggtgaccttgcagcccagctcatccttgagcttgagagcggcctcaacggcgttcatatcatcggggttgatgatggtctgcatggaagcgcggttcagggtaccatcgggattgacggcaaccttaccggaggtatcggggacctgcttaacgcaaacaagaatcttcattatatctttacctccttttttagttcacaccaagatacttggcaacgaccatacgctggacttcggaagtgccctcgtagatctcggtgatcttggcatcgcgcatcatgcgctcaacgggatactcacgggtgtagccatagccgccgaagagctgaacagcgcggcgggtgacgtcggaagcggtctcggccgcgaagagcttggccatggcagcgtccatggagtaatcctcgtgattctgcttcttcatagcggcagcgtaaacgaggtactgggcagcctgagtgcgggtgtgcatgtcggccagctggaactgggtgttctggaactggctcaggcggcgaccaaactggatacgctccttggtgtacttgacagcctcgttgatggcgccttcggcaagaccgagagcctgggaggcgataccgatacggccgccgtcgagggtcttcatggcgatcttgaagccttcgccttccttaccgagcaggttctccttggggacgacgcagtcttcgaagacgaggtcgcaggtagagctgccgcggatacccatcttcttctcgtgcttaccggtggagaagccggggaagtccttctcaacgatgaaggcggtgataccgtggttgcccttgctcttgtcggtcatggcgaacacgacgaaagtggaggcaacgttaccgttggtgatgaagcacttgctgccgttgaggacgtagtcgccgttctcgttcttgacagcggtggtctgctggccggaggcgtcggtaccggcgccgggctcggtcagaccgaacgcgccgatcttgcggccggacagaaggtcaggcagatacttcatcttctgctcctcggtgccgttctcgaaaatgggagcgcagcagagggaggtatgggcggaaacgataacagcggtggtgccgcaaaccttagcgagctcctccacgcacatggcatagctgagaacatcgccgccggcgccgccgtactgcttcgggaagtaaatgcccatcatgccgagcttggccatcttttcgacggtctccatggggaagcgctcttcctcatcgagttcctcagctaaaggcttgacttcattttctgcaaattcgcgatacattttgcggaccagcagatgttctttggacagatggaaatccatagtcttttgctccttcactatataaaaataattggattgtctaatttttcacaaatcagttccgtgactttcattatatcctgtgcgtttcattttcgcaagaggaactatcattcctttttggaattcgtgcttttcgccgaattcattaaagtctttttgacatttccgttccttttatgacagttttctgtcattttcaggaatcctttccattccaaaagagaaaaggggaggcagtttttgtaaactgcctcccctttttatccttttagggacggattacttcttgctgtaatcgtagaagcccttgccggacttcttgccgagctggccgccgcggaccatcttcttgagcagcagagcgggacgatacttcggatcgccggtctcgctgtagaggacgttcataatggcgaggcacacgtcaaggccgatgaagtcgcccagggcgagggggcccatggggtggttcgcgccgagcatcatggccttgtcgatatcctcgacagaggcaacgccggtctcaaccaggccgatggcctcgttgatcatcgggatcaggatcttgttgacgacgaagcccggagcctcagcgacctcgacaggctccttgccgatctccttggagaggttgtagatgaagtcgaaggtctcctgcgtggtgttggcgccgcggatgacctcaacgagcttcatgctgggcacggggttgaagaagtgcatgccgatgacggcgtgcttgaggccgaggcccatctcggtgacggacagagaagaggtgttggtcgcgaaaacggtgctctccttgcacatctcgtcgagctcgccgaggagctgacgcttggtgtccatgttctccgccacgcactcgatgacgaggtcggcgtccgccgcggcagacttctcctcgacgaggatgttgttcaggatggcgtccttggcctcttcggtcatcttgcccttctcgacacgcttctgcagggaagcggcgagcttatccttgtggcgctgagcggaagcgacgctggaagcgtacatcagagcggtgtggcccttggccgcgaagacctgagcgatgccgctgcccatggtgccggcgccgaaaactgcaactttcattgtgtgtatcctcctacaatataaatagataattctatggaatcacttgttgataaagggctcgtgcttgcgcttttcgaggaaggcgcccatgccctcctgctggtcagcgctctggaagcaggagccgaaggccttctcctcgatcacgacggcgcggtcaatgtcgacctgaagaccgtcgttgatggcctgcttggacgcgcgcaccgcgatgggcgcgttgccagcgatctggccggcgagcttttccgccgcggcgtagagatcagaaagcggatagaccgcgttgacaaggccgatgcggtaggcctcgtccgccttgatgttgcgggcggtgtagatcatctgcttggccatgccggggccgacgaggcgcgcaaggcgctgcgtgccgccaaagcccggcgtgatgccaaggcctgtctcgggctggccgaagacggcggtatcggagcagatgcggaagtcgcagctcatcgcgagctcgcagccgccgccgagggcatagccgcccaccgccgcgatcgtcgggatggggaacgcttcgagcttgcgcatgacgtcgttgccctgcttgccgaaggcctcggcctcctccttgctgagctccttcatctgcgcgatgtccgcgccggcgacaaaggacttctcgcccgcgccgcggacgatcaggcagcggatctcgcttaagtccaccgcgtcgagcgcggcatcgagatcggcgagcacctgagaattgagcgcgttgagcgccttttcgcggtcaatgatgagataggcaatgttgcccttgggttcatatttgacaaaagacatcgtgtgtctcctcctgtcttcttcaactgccccctattatatgggcggcaaggcatatttgcaagagaaaaatcacttttttcaaaaaagtttcacggttttccgccgtcattgcaagaaacgttgcatttttaatgatcttttctcccaatgcagcaactcttgtataaaatttttaaaatgacttgtctcttgcaccaattttcgatatgataggctttaattataggaaaacgaggttcattctatgcgaatgcgcaaaaagaaaaacctgcttccccgcatgaaacggtgcgaggcatatcagatcagggacccctacgagcgcaagggccgctggcacgacttgatgcccgaggcgaaagagatccgcgtggagctcggctgcggcaagggccgcttcaccgtcgagacggccgcggcggagcccgacgtgctgctcatcgcggtcgaaaaggtgcccgacgcgatggtcgtcgcgatggagcgcgcggcgaaggcagagctgcacaatgtcttctttatcgacatcgacgccaaccagctccctgagatttttgatcagggcgaggtcgaccgcatctatgtcaacttctgcgacccgtggccgcccaagcggcaggccaagcgtcggctgacgcacggcaatttcttgaagctctaccgcaaggtgctcaaggacaacggccaaattcatttcaagaccgacaacgacccgctgttcgagtggtcgatcgaagaaattccacagtttggcttcaccctctccgaggtcacgcgcgatctgcacgcgaacggacagtgcggcgtgatgaccgactacgaggcgaagttctatgccgagggcgagaacatcaaccgctgcgtcgccacgatgcagccgtgggaagagcccgaggaagaggatacgcccgaagaggcggacgaaacggctgaataagataaaaggaaggttgactttgtcagccttcctttttgctttcttcgagatacggcgagtacatcatcaccgcgtcgttctcggcgacgggcgtttccgcgagcaggttgccctgcaagtcaagcgtctgccggtagagctcgttgtggcggatgtagccgccccagtactgcgcgcgcatctcgtggttgcgctctacgaccgcatagcgctcggtcggctcggcgctcacgcgccactccccctcaaggtctgttttgccgacgcggacgcgcatctgataggtgtcctgtgtgtcgttgcggatcatcaggtcaagataggggtaaaagcaggtcgcgccgctgccgaagggctgcgtgcggttcgcgtcgggaaagacgtcgtagccgtggcggtggcgctcgacgaccgtgagcggcgtgtgcagcgtcatccagtagatgaggtttgagagctggcagagcccgccgcccgtcgcggccagatacccgccgttgcgcaggatcataccgggcagatatcccttccccgccgtcggctttccgatgagataccagtagctcatcgtttcaccggggcgcagcaaaagcccgtcgagccgcgcacaggcgaggcggagattcgtcaccttgttgcgctggagctgcatgtcgacgtccttgagctttcgcatgagcggcgtatggtgggaaaacgcctgatatgctaagtcttccccgctgcgctcgcgcgcaaaatgtttccgcatcgaaagccatctgagttttcgctgcgcgctaaaatacgcgccgccgagcttcagccgcaaattagagcgttttttcggttcgcggacggtcatatgcttccctcccctgtttttctgcttttatagacgcaaaacggcgggaaaaagttccaacattttcttatttcaggctcatcacgtagatttgacacggattccactcgtcccagagcgtcgggaatacctcaaactcaccaaaaccgagggcgagatagaagcagttcgtcgcgtcgtactcggggtacttccccatctgcacggtcttgacctgtaagaacgagtagccaagctccttcgcccgctgcttcgctgcggcaaagagcatcttgccgacgccgcggcggtggtattctctcagcacgcccatgacatagagttccgctgtatccctccccgtttcggcaaggtaaaggaagccgacggcgttctcgccgtcgaacgcggcaaaaaacggctgctttgcgcttttctcgatgtattcctcgcgcgcctctggaatgccaaaccagtcgggcagtgattctaaaatcaagcgcgcaatgcgctgcttctcctctgccgctgtgatctctctaacttccatacagttctctctttcattttgcaaagaagcggtatggctgcgccataccgcttcttatgtaatttagcgctggcccttgtcgtaggggatgccctcggccttgggggcgcgggagctcttggacgtgaacgccagcacgagcagcgtgacgatgtagggcagcatgcggtagagatgggcgctgatgccgatctcggcgagcatgtagacgccgtcgccgttgatgtcgatgctcgcgtagctcgccgcgatgcacttgaagaggccgaacagcagcgaggagaccgcgatattcacgggcttccagttgccgaagatcataacggccagtgcgaggaagccgaagcccgccacgtcgccgttcgaggcgcagtttgccgtcgtcagcgcatagacgaagccgcccatgcccgcgagcgcgccggaaatggtcgtgcccgcgtagcgcatcttgtagacgttgatgcccagcgaatccgccgcctggggattttcgccgcaggcgcgcaggcgcaggccgaagcgcgtcttatagagcaggatcgacaggatgatgaaaagcaggatgcagacgtaggtcgcaagatagaccttgttgacgaacgtctcgccgaaaaagccgaggtcggtgttcttgtcgatgccgagcgtagactttttgatcatgaaccagctcgccgcgtcgcccgtgagcatctgcagcgtattctggttggcgatgatgcggatgaagaacagcaccagcgcgggggccatcaggttcagcgccgtgccgccgatggtctggtcggcacgcaggttgatggaggcaaagctcagaagcagcgagaacagcgcgccgaaggccgccgcgaccagcatcgtgagaagctccacgccctgaagcgcgacccagttgccgctctgcttgagggagaggatggcgtcgctcgtctgcagaatgcgcacgaaccagacgccgatgaatgcgccgaagaccatgataccttcgagcgccaggttgatgataccgctgcgctcggcgaacacgcccgcgagcgccacgatcatcagagggacggcataaatgagcgtctgctgaatgaggaatgtcatttcgcgtcgcctcctttctccgtttccgcttgtgcaccggctggcgcgggaactgccgccggagcgggctccgcgttggcatccgcgccgtcgtccttctttttgccgagcttgccgatccacatcttgatgaccagcgagaaggcgctcagatacacgatgacggcgatgatgacgttcgtgatgtactcgttataggccgtcaggttcgtcagctgcaggcccgagatatcgagcatcgacatgaacagcgccgtgaagatgatgccgatggggttacaggaggcaagcatcgcaacggggataccgttgaagccgatggcagggagcgactggtacgtggaccagaagaactctgtgttgccggagagatagtagagcgaagcgcccgccgcgctcagtccgcccgcgatcgccatggagatgacgatgttacgcttgtcggcgataccggcatagcgcgcagcgtggcggttggagccgcaggccttgagctgatagccgaacgtcgtcttggacatcatcacgtaaacgccgatggcaaagatgacggcgatgaggatgccgccgttgacctgggagttcgggaagagcttgtcaaggcccatcttcgcggtggcgacgccattgtaggtcgtcttgtagatgtagccggtcttggtggactcggtgacgttcttgaagttactgatatcaaagagccatgtgacgaggtttgccgcgatccagttcgtcatgatacaggcgagcacctcgttgatgttgagcagggccttgaaaaggccggggatcgcgccccagatcgcgcccgcgagcgtgccgccgaggaaggcgagcagccagatgagcgtggtggacatcgtctcggacggaagaccgagggcgatggagagtgacacgagcgtaccgatgaggtactggcccggcgcgccgatgttgaaaaggccggtcttatacgccatgccgacggaaaggcccgtcatgatgagcggcgcggcacggaagagcatgttgccgatattcgtcgggttgaagccccacatcagcgtaccggaggcgtcgcgtcccgtggagaacaggccgccgaacacgatgcggatgccgtcccacgccgaggagagcgagaggttcgggctcgtgaggccgacgatcaaaatgacgatgctgccgacggcgaggccgatcaggatcgagaggacggacgccgcgacggtcttgaagccttcgctttgcaggaagtgttcttttttcatacggccgcctcctccttcgccatgcgcttggctccggccatgtaaaggccgagctcttcgacggtggttttcttcgggtcgagctcgccgacgatctcaccctcgtacatgacgaggatgcggtcagagaggctcatgacctcgtccagctcgagcgagacgagcaaaatcgccttgccgcggtcgcgctcggcgacgagctggctgtggatgaattcgatcgcgccgacgtcaaggccgcgcgtgggctgcacggcgacgatgagatccttgtcgcggtcgacctcgcgggcgatgatggccttctgctggttgccgccggacatggaacgcgcgcgcgtaatcgcgccctggccgctgcgcacgtcgaacttgtcgatcaggtagttggcatagtcgcgcacagccttgttgttgataaagccgtggttttcaaagcgcggctcgttgaagcgctggagcaccatattctgctcgagtgtgaagtcgagcacgaggccgtgcttgtggcggtcttcgggaatgtggctcatgtgctcaccgcggtggcggatggaggcatgagagatatccttgccgcagagggtgatcgtgccggaggacggcttatcaaggcccgtcaggccgtagacaagctccgtctgaccgttgccgtcgataccggcgatgcagacgatctcgcccgcgcggacggtgaaggaaacgtcgttcacggcgttgcgcttttgcacgtgggaatggacgcagaggtggtcgaccttcaagacctcgcccgcgggcttggcctcgtccttcgtgacctcgagctgcacggggcggccgaccatcatgttggaaagctcctgcttggtggtctcgctcgtattgaccgtgccgatgtacttacccttgcgcagaacgctcacgcggtcggaaacctccatgatctcattgagcttgtgggagatgaagaggatggacttgccttcgcgggcaaactccttcatcgtggccatcagctcttcgatctcctgcggggtgagcaccgcggtcggctcatcgaagatgaggatctcgttgtcgcgatacagcatcttcagaatttccacgcgctgctgcataccgaccgtgatatcctcgaccttggcgtcaaggtcgacattcaggccgtagcgcttcgagatctcctcgacctttttgcgtgcctctttcttctgcaaaaagccgcacttcgtcgtctccgcgccgaggatgatgttgtcgagcaccgtgaaaacgtccaccagcttgaaatgctggtgcaccatgccgatgccgagcgcggtggcgtcgttcgggtccttgatggacacgaccttgccgtcctttttgatgatgccctcctccggctgataaaggccgaagagaaccgacattaaggtcgattttcccgcgccgttttcaccgagcagggcgtggatctcgccctttttgagctgtaaggtgatgttgtcgttggcgataataccggggaatttcttcgtgatattcagcatttcgatcgcatactgattctccaagttttttcgccctccttccgttttgatggcccgcacgcgctgcgctgcgaggacggaaaccataattacattatactatatcacgttttccgatgaaaagcaaaaggttttcgcatgtctttccctgtcagaaatgtgaaaaagaacggaagaccgaagtcttccgttcttttatgtatgcgctattgggaattagccgccgatgtagttgacgttgacgttggtcaggccgccctcagcggggttggccatctcagagttgttgtcgatggtgatgtcgccgttgaggaccttctggaagaggtcttcatagtcggcaacggagaagttctccatggaccaggtagcggtcggcaggccgacagcattctcagcaacgcccagggaggtggcagcattgccgatctcgtcccaggtgccatcgtaaaccttggcgatcgcccactcggcagcatcgctcaggcccttcatagcggaggtgacgacggtctcggactcgctggactggtcgacgtcgacgccgacgaccttgccgtcctcagcggaagcggcagcggcgacggactggaacatggaaccgccgcaggcgaagacgatctcagtgccgttggagtaccagccggagaccatggtctgcagctcgggggaagcctggaaggaagcgccgtactcccaggagtagttcaggtcgacggtcttatccatttccttagcagcgtcgttggcgccctgagcaaagccccagccgtaacggatgcaggcggggttcgtgccgccgccgccgccgccggtgaagccgagcttctcatagccttccttgacgacagcgtaaccggcgaagtagccgcactgctcttcgttgaaggcgatgcccgcaacgttgtcaaggccgagggaccaaccgtcgatgaagacgaacttggtgtcggtgaattccttagcggccttctcgagggccgtgccctgcatgaagccggcgcagacgatgaccttggcgccgccgtccacggcagccttcatggcgtcgtaacggtcgtcatcagtagcctgatcgccgttggcgggctgatagtatttgtagctcaggccgttgttggcggcatagagcttcacgccgtcgaaggtgccctggttgaaggacttatccttcagctggccgacgtcggtgacgaacgcgatctcatacttgccgtcttcggacgtcatgttgtcgtcgatatcgtcaggattggtgtaagtggtggtgtcgccctgctgatcgtcagtgttggtgtcgccctgattgtcgtcggtcttcttatcaccgcaggcaacgagggacagaaccatgacgagagcgagaagcagcgcaaaaaacttcttcattcttctatccttccttatttttccggtcggcggcgggccgctttccggtttattttgaagtgcggacgcacttcgtttgacagtatagcaaaagcaaaggggagaatcaagtccgattctcccccattttactttttttgtgataattgatgggattctttacaaaaagtccacactttttacacgttattttctcagtcgagcttcaggtcgccgtccttgacccagccgaggcggcggcagaccatattgatgagcggagcaaggatggcgggcagcacgatggcaacgaggatgagacccagccagtcaaagcccgttgggctcatggccgccgcgcccttggcgacagcctcctcgctcggggagacccagcccgtccacacgccgatgaggccgcacaggccgcaggtgcccataccggagttgatcggcgcaccgttcatctcaagatggaacacgcacgttgcgatagggccggtgatggccgaggcaagcgtcggcgcgatccagacgcggggatttctgacaatgttcggcatctggagcatcgacgtgccgaggccctgagagacaaggccgccccagcggttttccttaaagctcatcacggcgaagccgaccatctgcgcgcagcagcctgcgacggccgcgccgccggcaaggcccgtcaggcccagcaccgagcagatggcggcggaagagatcggcagcgtgagcgcgacgccgacaagcacggagaccgcgatgcccatccagaacggctggagtttggtcgcattgtcgatgataatgccaaatgccgaggccgccgtgccgatgggcggggcgatccacttggcgagcgcgacgccgaccaagatggtcacggcgggcgtgaccaaaatgtcgatcttcgtctccttgctcacggccttgccgcactcggcggcaaggatcgcgatgatgagcaccgcgagtgggccgcctgcgccgccctcggcgttggccgcatagcccaccgccgcgagggagaagagcaccatcgggggcgcctgcagcgcgtagccgatggcaatagccatcgcagggccggagacggacatcgcataggtgccgatgtccgtcagaaacggaacgcccagctgcgcgccgagcgtcttgatgatcgtgccgatgagcagcgagcagaagaggccctgcgccattgcgccgagcgcatcgatgccgtagcgcttggccgagacttcaatgtttttgcgtttgcagaacgctttgaatttttccatgatatcctcacagcctaaaaataaaatagtgtcatgtgcaggtgtcttgacacctgcacatgacactataatcgcttgtgtgaggattgtcaacccttaatttccgttttcctccagcaggacgcgcagtgcgcgcagcgcactcttcgtgcgctcgaacgccgcctcgtcgggacaggagagcgtgtgcaggtggatgccgtcggtaagactggacagcggctccgcctttttgcagcgctcaatgaactggctgacctcgtagcggttcgaaatttgcagcgggccggtgagctggccgtagatggggtggtcgacgatgacgtcgatgaccgtacagccgttgtcgacgatggtgttgagctcggcttccatctcctgcggcgtgtgcttcacggcgacacggcggaggatgccgcgtgcctccttcggcgtcacatagccgcgcggagtcgcgaggatttcctcgcccgaggagcgcagcagcgcgatatcgcccacgatgatctggcgcgagacggagaatttttccgccagcgcggaggcgctgatcggcgcgtccgccgcgcgcagcacgtcggcaatggcctttcgccgctcgtcagaatgcattcgctctccctccccttttcgcgcaaaagcgccaaattccgattacgttttgtattgtaaaaatcagaaattacaatttgttgtcggattttgccgatttaatactcaaagcagctgccgccgacgaactctcgcacgatggagtcgcgcgggacatagtccgtgcgcagcgacggcacggagttgacaacgtccatcaggtcgctcagcccgtgctcggcgataaactgatcgtcgagctggctgtaaaactcggggatctccttcaaataccgcgcgaggatgcacggctcgtagtcgtggaacgtgtcgatgtggatgctcgcgttcggcttgttcggcatgatgtagttgagctcgccgcggtcgacactctcggcgcgctcgacggtctgacgcagcgaatggccgcggccctgatagtcgcggatcatgcggcgcgccacgcgcagctgctcgggacgaacgatgcggtccttgtgcgtgatgatacgcgtacgcggggcaacgtaaacgcccgtagcttcgcttctgagctggtcgaaaatcagcgggttgagcatgtggatgccctcggcgatgatgacggcgtccttgttgccctgcatgggcttgtagccgccgacgccgccggccttgaagtcgtagaccggcagctccacgagctcgccgtccatcaagcggtggatatcctcgatgagtaaatcgcggttcacgcagtagggcgactcccagtcgctcgcctcgggcggacgctgatcaatcggcaggaaaaagttatccatgctgagcatgcagaccttgacgccgaggttttcgaggtattcgcgcaggcgcatcgccgtcgtcgtcttgcccgaaccgctcgggcccgtcaggcagacgatgggcttttgtcccttgttcattaaaatgctcgccgcggcggagctgatcttgtcgtgaaagacctcctcgcagcgcaggacgaagcgggtatcgtccttcatgttggtcacaatgttttcaatatcgatcacgcgcatagcatgataatctccttacttttgggattctgccgccatctttacggctgtttcgagcgcgattttcatcatggcggtgaagctcgtctgccgcgcctcgggcgaaagctcctcgccggtgaggatattgtcggagatcgagcagagggaaagtccgcgctttttcgtataggcggcgttgcagtagagggcggcggcctccatctcgatggcgagcacgcccatgtccgcccacttaagcgacgggttcgacgcgtcgtagaacgtgtcggacgagtagaggttgccgacgtccatgcggacgccgagctcctttgccgattcgacagcggcggagagcagctgaaagtccgcaatgggcgcaaacgtgccgccaaggccgtactgcgcggcgtaattcgagttcgtgcacgcacccatgcccgcgaccacgtcaccgagcttcaagtccttttgcagcgcgcccgccgagccgacgcggatgatgctctcgacatcgtactgcgtgaacagctcgtaggagtagataccgatggacggcatccccatgccgctggccatcacgctgacgggaacgcccttgtaggtacccgtgtagccctgcacgccgcggacattgttgacgagctttggttcatctaaaaatgtttcggcgatgaacttcgcgcgcagcgggtcgccgggcatcagaacggtcttggcgaagtcgccctttttcgcgctgttatgcggagtcggcatattgagccctcccctttcttaaagttcgcccttggcctcgagctccttgacggccttgacgatgcgggacgtgccgaggcggtcggcgccgagcttgaggaagtcttcggcatcctgcagactcgcaatgccgccggcggccttgatcttcttgccgttggtcatgtgggcggccatgagagcgacatcctcgcgggtcgcgccgccgccagcaaagcccgtggaggtcttgatatagtcggcgtgagaggcagagacgacctcgcagagcttgatcttctcttcgtcggtgagcaggcaggtctcgatgatgacctttaagatgttgccgtggcaggagatcttgacggagttgatctcctgaaggatcttgtcgtactggccttccttgacccagccgaggttgatgaccatgtcgatctcggtcgcgccgtcggcgacggcggactcggcctccatgcacttgatgccgctgggcgtgtagccgttggggaagccgatgaccgtgcagatgggcagctggccgaagccatagtgctgctgctcggcgacgtagtgcgcggcgtgattcacataggtctgcggaatgcagacgctcgcgcagccgtacttgatgccgtcgtcacagatctgcttgatgtcctcccaggtggcagtctgcttgaggagggtatggtcaacatgcttgagaatttccttaacgtccatgatatatttcctttctgtcgttgaaagcgtatttgatcaaaaatcgttttattttagcatgtttccgcgcttttgtctaccgtttcggcaggtctcttacagtgcgctgccgaaatactccgtcatcgcgcggatcaggaattcatagtcctgcacgcccgcggtctcccacgaagagtgcatcgcgagctggggaaggccgatgtccaccgtgctgaccggcacgagcgtgtcggagatcgagccgagcgtcgagccgccgggaagatcggagcggttggacatgacctgcgtgggaacgcccgcgttttcgcacacggcgcggaaaatagcgcaggagcggccatcggtcgcgtagcgctggttggcgttgaacttgatgacgacgccctcgttcatatacgggcagttgtcggggtcggcgtattcaccgtggttggggtgctgggcgtgcgcgttgtccgccgagacgaggaagctgcacgcgagcatcatctggagctcctgctcgtcctttccgaggcacagggcgatgcggcgcagcgtgtcgcgcaggaacgtcgaacccgcaccctgcttggtggacgagccgacctcttcattgtcgaaaatgcagcagacggcgatatttccgctctccttcgccgcaaggaagccctcgaggcagccgcaggcgcactcgagatcgtcgagcttgggagaaaggatgtactcctcgttctcaccaagcagcgtcccctcgccgcggcagtagaggaacaggtcgctgccgaggatgtcgttttctgcaacgtccgcggctttggcgacgatgggcaggatgccgccgctgtctttgccgccgagcagcggcagcgtgtcgatattcgcgaggtacttcatgccgtcgttcgccgtgcggttcatgtggatggcgacattgggaatgacgagcaggtcgcggtcgacgctcacgagtttttcgacgatctcgccgtttgcgcgcacgaagacgcggcccgcgacggagagtgggcggtcgaaccacgtcgacatcagcatgccgccgtatttttcggtggagagctggacataatgcgcgctgcggcggtcgggatgctcttttaaacggaacgctggcgagtcggagtgcgccgcagccatggcgaagccgccgtcgatcatctccggcacgcggaaggcgatggtgctcgagccgttgcggcggacgaaatacttcccgccgggggctgcctcccagcgttcgcgttcggaaagctcggtatagccgtttgcgaggagcttttggcggatgttctcggtcacatggtagcaggtggggctatttttgataaaatgcagcagttctcttgccggtgcatgttgcatggtgatgtcctccacagtttatttttgtttggcggtattatagcacacgtcatgcttctcggcaagcggacactccctctgtgccgcacaaaacaggggcggcatttgtgcatttgtccatatttggtggaattatagttgattcttttatcgaaatcctttataatacagttgatttccgtcccccctcccgcatcgagcgggcttttgtttgcgctcttaagccggaaggaggctatttctatgaacgaatcctcttctcccgcgccagctccggtctcaccgctgtggacgcgggatttcactatcatcacattgggcagcgtgatctcgatgctgggcaattcgatgtccggcttcgcactgagcctgctcgtgctggactacacgggctcgaatctgctctacgccatctacattgcaacgttcacgctgccgcagatcgtcatgccgatcttctcgggcgcgatcctcgaccgcttttcccgcaagaagacgatctacacgctggactttctttcctccggggtctaccttgtcgctgcactgatcctgagccgcggctggttcagctttccgatgctcgcggtcttctgctttatcatcggctcgatcaacagcatctactatgtcgcctacgacagcttctatcccctgctgatctctgaggggaactactccaaggcctactccatcgcgagcgtgctggagacgctctcggcgctcatcatcccgatcgcaacgtacttttataatctcttcggcattgcgccgctgctcggcatcaacgcgctgtgcttcttcatcgccgcgacggcggagacgcagatccgcgccgaggaacactacatcgaaaagcagcgtgccgcgctcgcgctcgaagagcagcactcctcgggccgccagctcctgcgcgacatcaaagagggctttcgctatctgatgagtgaaaaggggcttctgcgcgtggccatctatttcacattcagcatgctggcctcgggcgcgtcgcaggtcatcacgctgccgtacttcaagtcgacattcgataacggcgaatacatctatatgctcgtctggggcatggcgatcttcggccgcgccatcggcggcggcattcattataaaatcaagctgcctgtgcagcataagtattccattgccctgatggtttatgtcgtcatctcgctgtgtgagggcttctatctctactgcccgctgccggtgatgatggtctcgtgctttttaacgggtatcctcggcgtgacgagctacaccatccgcatctccgccacgcagagctacgtgccggatgagaaaaagggccgcttcaacggcgcgttcaacatgctcaacaccgtcggcagcttcacgggcaatctgctcgcgggcgcgctggtggcgtttctccccgtgcgcggcgtgctgacgggctttatgctcgtcacggcggccgcagcggtcgtcgtcatcggcggcggacgcaaggacgtgtctgcgatctacaaccggcaggaataaccaacttttgtccaataaaaatttgatggaggaaacaacatgaaattttccgaaatgacctacatccgccccgatcctgaggcgagcaagcagcgcctttccgcgctgacagaagagctcaaaagcgccaagagctacgaagaagcacgcagagtctttctctcgcagcaggagctgatgagccacatctccaccgccgcgacgcttgcgagcatccgccactcgatcgacacgcgagacaaattctacgacggcgaggaaaaattctggaacaacttcaaccctgagcttgaggaatacaatcaggcgtggacggcagcgatgctcgaaagtgccttccgcgcggactttgaaaaggaatacggcgatctgatgttcttgaacgccgagatcgcgctcaagaccttctcccccgctatcatccccgaattgcagcaggaaaacgacctgacgcaggagtatgaaaagctgctcgcctcggcgcagatcccgtttgagggcaaggtctacacgctctcgcagctctccccgttcaagacctgcgctgacgatgaaaagcgccttgccgcgtggaaggccgagggccagtggtacaaggacaatcaggcaaaatttgacgagctctacgacaagctcgtaaaactccgcgacgcgatgggcaaaaagctcggctacgagggctacaccacgctcggctactaccgcatgggccgcaactgctatacgaaggacgatgtcgagaagttccgcgaggcggtcgtcaagtatctcgtccccgtggccgacaaggtctatcgcgagcaggccaagcgcctgggcaagcagtatccgatgagctttgccgacaacgcgctcgaattccgttccggcaatccccgccctgcgggcacgccggacgacattctcgcccagggtatgaagttctacagcgagctctcgcccgagacgaaggagttcttcgaaacgatgctgcgtgacgagctgctcgacgtgctctcgaccgagggcaagcaggcgggcggctactgcacgagcatcatggactatgaggttcccttcatcttcgccaacttcaacggcacgcagcacgacgtggaggtcgtgacgcacgaggccggtcacgccttcgaagcctggacgaaccgcaagcgcatccccatcgactacatctggccgagcatggaggcctgcgaggtccactcgatgtctatggaattcttcgccgagccgtgggcagacggcttttttggccccgacgcgaaaaagttcctctacagccacctctccggcgcactgacgttcatcccctacggcacgatggtcgaccacttccagcacatcgtgtatgaaaagcccgagatgacgcccgccgagcgccacgccgtttggaaggagctgctcggcgtctacatgccgtggatgaagcttgacggcgagatcccgttctactccgagggcatgggctggcagcgccagcaccacatttattcgagccccttctactacattgactactgccttgcccagaccgtggcgctcgaattctgggcgatgatccgcaaggacgtcaagaatgcctggcagcactacatggcctacaccgtgcagggcggcagccggacgttcaccgaccttctcaaaaacgccgaccttgagagtccgtttgacgaagcgtgccttcgcggcgtgtgcgccgaagcggaaaaggcgctcgcggactttgacctcacggacatcgaatgatgggcaaacagcacaaaaagcacaaccgccgcgagcacctgaacgactttcatctgaacgtcgcgggcgaatatgtttacgacggggcgctctacgcctgccaaagcgatgatgcaaagcagcgcagaatcaagcgcgccgtgtggggaatggcggccattttgatcgccgcggtcctcgcgggcgggtgcattcccgcgccggggatgcagaactgtttttacgttctgctcccctacctcggcgagtttctgggcgcggcgagcgtcatctgggcgcttgcaaagctcggcatggattggggcacggtgcgcgagtacaactacaaaaaaagcgtggccgttctgcccgtgcgaacggcggtcacagcggtcttttctcttctcggcatcgtgtgcgaattgatcttctttttcgtcaatgaccacgcaggacagacgtttttcgcgctgctctatgtactgctgaagctgacagccctactgagcgcccttgttctgcgcgccgaaattatgcaggcagaatgggacaaattgcctaaaaaagataattcctaagattttactctgtacaatttgcatcctttcatgctataatcaaaaaaattctacgcgctgtttttcggcgcacagatgtccataggaggcgcactccccctttccgcgcgtgtacacgcgcgggcaccttactttgtgctgcacggggcgacccgtttggcaaaaatttataaaggagtagattcaatgaaaagaacacttgcactgatcctttctctggtcatgtgtcttggtcttctggccggctgcggcgacaagaagacggacgacggccagaccgacggcaagacgcttgttgtcggcacgcagaacttcgacggtaagttctcccccttcttctataccaatgactatgaaaaccaggtcatgggtatggtcttcgacggtctgtttctcgtcgaccgcgagggctctgtcgtcctcaagggcatcgagggcgacgtccgtccctacaacggcaccgactatacttacaagggcattgccgactgcgacatcgttgaaaacagcgacggcacggtcgactacaacatcacgctgaaagagggcgtcaagttctccgacggtgaggaaatgaccatcgacgatgtcatcttctcttactatgtcctgcttgaccccgcttatgacggcgtttccacgctgtactccctgcccatcaagggtctggaggcctatcgcagcggtatggacactgtgcagaacctgatcctcgccgccggtcctgacgcctacgccgccaacgacttctacaccgaagagcagtacaacgcttactggaccgccttcaacgccgccggcgtgaagttcgcccaggagatccttgactacgtggtcgccgccggttacgccaccgctgacgactccgtcgccgcgcaggctggcaactggggcttcgagctcgccgatgacgcgaccgtcgaagacttctgggctgccatcgttgctaagtacggctacgacatctccgatgacggcatcaatgccgagaccgccggcaccagcatctccgccttcctcgaggccgagctgggcgacgcctacaccgactataccgtcgccgtccagaccggcgagtccgctcccaacgttgccggtatcgtcaagaccggtgactactccatgaccgtcaccctcaccgaggtcaacgccaccgccatctatcagctccccgtcaccgtgtgccccatgcactactatggtgagactgacaagtatgactacgacaacaacatgttcggctttgtcaagggcgatctgtcccacgtcaagtccgtgacctccacgcctgtcggctccggcccgtacaccttcgagagctggtccaacggcgctgtcaccctgcagaagaacccgacctactggaagggcgagcccaagatcgacaccgtcatctggcgcgagatgacggatgaagacaagatccccggcgttgtctccggcacgatcgacgtgaccgacccctcctactccaaggaagctgccgagcagatcaaggaagccaactctaacggcgagatctccggcgataccatccagaccgacctcgttgccaacctcggctacggctatgtcggcttcaacgccaaccgcgtgaaggtcggcgacggcaacggcggtgatgaggcctccaaggatctgcgtaaggccatcgccacggttatcgccgtttaccgcgatgtcgctgtcgactcctactacggtgagttcgccaacgtcatcaactaccccatctccgacacctcctgggccgctccgcgcgttaccgatgagggctacaaggtcgccttctccgttgacgtcaacggcaacgacatctacaccgaaggcatgagcgccgacgacaagtacgccgccgccaagcaggccgctctcggctacttcgaggctgccggctacaccgtcgctgacggcaagatcaccgctgctcccgccggcggccgcatggacgctgaagtcatggttggcggcagcggcaagggcgaccacccctccttcatggctctgaccctcgcgtccgacgctctcaaggagatcggcttcaacctgatcgtctccgatatgtccaacttcgccgagatgaccaacgcgatcaacgccggtactgccgacatgttcgccatggcatggcaggccacgcccgacccggatatgttccagatctatcacagcaagggcggctccaacgagaagtcctactggatcaaggatgccgacctcgatgagctcatcatgatggctcgtcagtccaccgaccagacctaccgcaagaccctgtataagcagtgccttgacatcgtggccgactgggcggtcgagatccccatctatcagcgccagaactgcgtgatcttctccgccaagcgtgtcaacctcgacaccgtgacgcctgatatcaccacctactggacctggtacaacgacatcgagctgctcgacctgcagtaagctccgtcgctgcacaaaaacgttacttaggcgcatggctaccctgcggcttctgccgcggggtagcctgccccaggcacatctgcctatgatccaaatgccccggtgcatcggagcatttggctgatatgcagagagagacatatcaaacccgaaacggcgacaagaccccgggcgcggggcggccgttatcaaaaaacggagggattctatgcgcaaatatctggtaaaacgcctgctgctgtcggtggtgatcctcttttttgtgacattcatcatctacctgcttatgcgctgcatgcccagctcctacgtggagaatatggcgcggcagctctcgcaggctcccggctccaagccctatgaggagtggctggcacagctcaacgcacaatacggtctggacctgggcctcatccccggctttttcgtccagctcaagaacctgtgcaccggcaacttcggcgacagctggaagtataccgtgcccgtcatccagaagttcaacgaggtcatctgggtctcgttcatcatgggcgccatctcgctcgtgttcgagcttctcatcgcggtgccgctcggcatcgtggccgccaccaagcagtacagcgtgaccgactacaccgtcacgacggtcgctctgctgggtatgtcgctgccgacgttcttctttgcgacgctcttaaagctcatcttctgcatcaagctccgctggttcgaccttgtcggcctcacgggacgtgacttcaactccctcagccagtttggtcagatcctcgatatggcaaagcatctggtgctgcccatcgtgacgctggtgttcatttccatcggcccgtggatgcgctatgtgcgcacgaacatgctcgaggtgctcaacgccgactacatccgcaccgcccgcgccaagggtctttccgagcataaggtcatctatcaccatgccttccgcaacacgctcatcccgctcgtgacgttcatcggcggctcgctgcccggcctttttgccggcgcgctcatcacagagacgctgttcgccatccccggcatcggcttcatctcgtacaatgcgatggtcgcgggcgatatccccttctccatgttctacatgacgttcctggcgatcctgaccctgctgggcaacctgatctccgacatcctgtacgcggtggtcgacccccgcgtgcgcatcgcgtaagaaaggaggcgctaatccatgtctgaagaaaagaagatcaacgatcagcaggagagcggctcccccgagcagctttccctcaacgacgaccgccgcgtcaaggtcctttccccgggcacgctggtcgccaagcgctttttccgcaaccgcctcgcggtcgtaggtctgacgatcctcgccgtgatgttcattttctccttcatcggcggcctcatcagcccctacgggcaggacgaggtcttctaccgcgacgatatccagctcaaggaatacgccgccatgagcgagaacaccgagtaccgctatctcgtggccgacggccaggagttcggcacgatcctccaggcgcagctcacgctgcacatgggcaaggacgacagcttctcctacaagggcgtcacctacgacgtgaccgaggagggcgactcgctctactccgtctcgagcggcggcagactccttgccatcgcctataaggacatcatcagctcgaacgaccccagccagaagttcggcttcaacttcagcttcagcgccctcaaggcgcacgccaacggcgaagcggagtttacggccgacggcaaaacctatacgcttgatgaagacagcgtcatgctgaatggcgaggagatcgcctacatcagccgctttgtcatccagtccaaggtcagcggcacggtcatcagcaaggacttcaaagagcgcgtgcagcaggccgtcgaaaacggtgagaccgagtacacctatgtgaacgacgccggtcaggagcgcgagatcaagcttgaatacaatcccgccaagtaccagtggtcgatcaaggagggcacgtccacccgcgtgttcgacgcctattccttccccgactccgcgcactggctcggtacggataaaaacggtatggatatgctcacccgcctgatgtacggcggccgcgtgtcgctgatgatcggcttcatcgtcgtcatcatctccgcggcgctcggcgtggtgctcggcggcgtctccggctatttcggcggctgggtcgataacctcatcatgcgtatcgtcgatatcttctactgcatcccctccaccccgctcatcatcattctgggcgcagcgatggacggcatgcgcgtcgacccgcagatccgaatgctctacttaatgttgatcttgggcttcctcggctggccgggtatcgcccgtctcgtccgcggccagatcctctctctgcgcgagcaggagttcatgaccgcgacggaggcctgcggcatcagcgtttcgcgccgcatcttccgccacctgatccccaacgtcatcccgcagctcatcgtcaactgcacgatgagcctcggctccaccatcatcactgaggcaacgctcagcttcctcggcctcggcgtcaagttcccgttcgcctcctggggcaacatcatgaacgacgtttccaactcttacgtcctcacgagctactggttcatctggatccctgccggcatctgcctgatgctgacggtcctcggcttcaacttcgtcggcgacggtctgcgcgacgcgttcgacccgaagatgaagcgctgagaaaggagggaatttgaatggctaagaagcataatgacggctatctttccgcaaaggaatcccgccgcatttccaaagaaaaccgcaagatcacaaatgcgctcgaaaagaagcgcaagcgcaagaacgttcccgaatccgagtatctgaccgagatgcacgaccccaacaacgcggtcgaattcgacaacctgcacacctactttttcaccgacacgggcgttgtcaagtcggtcgacggcgtcacgttctccgtgcccatcggcaagactgtcggcgtcgtcggcgagtccggctgcggcaaatcggtcacgagtttgtcgctcatgcagcttttgcagcgcccgcagggtcaggtcgtggagggcgaaattcgcctgaacctcggcagcaaggcctacgacgtcacgaaggcgcctgacagcgtcatgcagcacttacgcggcaactacatctccatgatcttccaggagccgatgaccgcgctgaaccccgtgttccgcatcggcgaccaggtcgacgaggtgctggccctgcacaacgaaaagggccacgacgaagcgcagatcaaggcgcgcaccattgagctccttgaaatggtcggcattgccaacagcgagggcgtttacaagatgttcccgcacgagctctccggcggtatgcgccagcgcgtgatgatcgccatggcgcttgcgtgcagcccaaagctcatcatcgccgacgagcccaccacggcgctcgacgtgacgatccaggcgcagatccttgaccttctgcgcaacctgaaggatcagatcaattcctcgatcatgttcatcacgcacgacctcggcgtcatcgccgaaatggcggactatgtggtcgtcatgtacgccggccgcatcgtcgagcagggcacggcggaggagatcttcgcccatcccgcgcacccctacaccatcggcctcatggcctccaagccggtcgtgggccgtcaggtcgacaagctctactccatccccggcaaggtgccgaaccccatcaacatgccgaactactgctatttcaaggaccgctgcgaaatgtgcgtgaacggctgcgagggcgactacccgcacgaggtcagcatctcgccgacgcacaaggtgagctgctaccgctattacgacggcaagcgccccgaccttgaggaggtcgtggaggaagaactggccgagggcaaggaaaacggaaaggagggtgaataagatgccgttttggaaagccggtaagaacgacgatcaggtcctcgatgaactgaaggaaacgcagaagcagaatgccgatgaatttgtcaagaagcaggagcacgccgatgaggcgcagaagtcctcactcatcatcgacaacaatttcacccccgtggaatatgacccgcagtacattctgcaggtcaatcacctcaagaaatacttcccgatcaagggcggtatggtgtcgaagacggtcggctatgtcaaggccgtcgacggcgtcacgttcaatttaaagcgcggcacgacgatgggccttgtcggcgaatccggctgcggcaagacgaccacgggccgcacgatcctgcgcctgtatgactccaagtccggcggtcaggtgctcttcaacggtcaggaggtctatgacctctcccacaaggagctgcgcgccctgcgcacgaagatgcagatcatcttccaggacccgttctcctcgctctccccgcgtatgccggtcggcgagatcatcggcgaggccgtgcgcgagcataaccttgtcccgaaggcggaattcgacgattatatcgaccaggtcatggacaactgcggcttacagccgttccacaaggaccgctacccgcacgagttctccggcggccagcgccagcgtatctgcatcgcgcgtgcgctcgcgctcaaccccgagttcatcgtctgcgacgagccggtctccgcactcgacgtgtccatccaggcgcagatcatcaacctgctgaacgaattgcaggataaatacaagctgacgtacctcttcatcagccacgacctttccgttgtcgagcacatctccgacaccgtcggcgtcatgtacctcggcaacctcgtggagtacggcgcgaaggaagatatcttccgcaacccgctccacccctacacgaaggcgctcttctccgccatccccattcccgacccgaaggtgaagatgaaccgcatcgtgctcgagggctccatcccctcccctgccaatccgcccaagggctgcaaattccacacccgctgcgccaactgcatggcctgctgcaaggaggaagcacccgtccagcgcgagatcgagccgggccacttcgtgtgctgccacctgtacgataagtgatgaagaaggacgacttctacgaggaggacgacggccgcacgatcgccgacatgagcggcatcgaacgccagccgacctttctcccacactttcaccgcaagcgcagcgacttttccgcgcccgacgcgccccgtgcgaacgaccgcccgtgggaaagcgctgccggtgagctgacgcgcgaggagcgcaatgccgccatccgcggcgcgctcaaggcgggacttctgatcgcaggtgtgtatatcctcgccgctgcggcgctgatcgtcgcaatgcagctgctctggtcttaaatatggaaaaaggaagactctttcgagtcttccttttttatttttctgcacggcaacgacaaatagctctcttttcttcggatttcagattgttttcatctttattctatgatatactaagtaaattgtatgtcgtaaaaaagagaggagattcttcatggatcataaaagaggttccttttccggcaagattggctttgtcctttcggctgcgggcgcgtccgtcggcctcggaaacatctggcgctttccttatctggccgccaaatacggcggcgctattttcctgctggtatacatcattctggcgatgaccttcggctacacgatgatcattgcggagacttcgatcggccgcatgaccggcaagagccctgtcggcgcttacaagtccttcagcgataagcctgcgctgcgcgtgggcggctggatcaacgccatcattccgattctgatcgtcccctactactccgtcatcggcggctgggtcatcaaatatctggcggaatacctgatgggcaaggcgcacctcgtcgcggaggacggctatttctcgtccttcatctccaacggcgtgtcctcggagctttgcttcctcgtcttcacggccatgacgctggcgatcatcttcgcgggcgtggaaaacggcattgagcgcgtctccaagatcatgatgcccattctcgtggtgctgtcgctgatcatcgccgtgtattccgtgacccgccccggtgcgctggagggcgtcaagtacttccttgtgcccaatcttgacaacttctcctggatgacggtcgtctccgccatggggcagatgttttattccctgtccatcgccatgggcattctcatcacgttcggttcctacatgaaaaaggacgtcccgatcgaaagctccacccgcaatgtcgaggtcttcgacacggccatcgccatcatggcgggcctgatgatcatccccgcggtgttcgccttctccggcggcgatcccggcgcgctgaaggccggcccctcgctgatgttcatcaccatcccgaaggtcttcgattccatgggcttcggcacggtgatcggcatcgcgttcttcctgctagtgctgttcgccgcgctgacgagctccatcgcgctgacggaaagtgccgtctctaccttgcaggatgagctgcactggagccgcagaaaggccacgagcatcatgggcgtctctatggttctcctcggaagcctctccagcctgggctatggcccgctggcaaatgtcaccgtgatcggcatgcagtttttggacttcttcgatttcctgaccaactccgtgatgatgcccatcgcggccatcgcaagctgcatcctcgtctcccgcgtcatcggcgtcgaccgcatcgcggacgaggtcacgctgaacggcgcgcccttccgcagaagaaaggtcttcaacgccatgatccgcttcctgtgcccgttcttcgcggcgatcattttgatcagctcgatcgccagcgcgttcggctggatctcgatgtaaatagtcgcgctcaccgagcgcggcacgaatcaaagggggctattctcttttgtgaaagagaatagccccctttcaatcccccaagagaaaggttttagattggcagtctcaatctcgaatgacctttttccctccggaatggaaatgcctgcgcgcggcgatgccgcgtttagagctactatacgatttgcctctgctcctactatccgctgttgcgcagccgttggcaactctgctgccttacggatgcggcacaccccttgcgggtgccgctctgtccatcttgtagaggtacagactaatctcctgctgccaacaatgcataccgtttcgataatgcgtactgcggcgagcgaagctatgccgcttcggcaggcaataccaggattgatagaatccgaagtagaacgcagttatgtaagggtaatgaatcgcaggcaaagcgacagcgaagatagaagtaagtcaaatcgtttagatataaaacaaggcaggcacctgattcggcaagcattgcagttcttcgagctgctcgcttgcaatggcggggtcaaggggcaaggccccttgcgttctcttgggggtccaagggggatattctctcacgtgagagaatatccccctttggtgtcgcggcgcgcacgccgctctccctcccgcgcttacgcgggaaaaggtgcagccctttcgggctatccttccctccgcgcggcgcgcggaaagcacctgcgcccctgcgggcgcaaaaaaagagcacccttacgggtgctctttttcaaatcgctgagaattagccgaacagggacatcaggacgcctgcggcgatagcggaaccgataacacctgcaacgttcgggcccatggcgtgcatgagcaggaagttggaggggttctccttctggccgacgacctgagaaacacgggcggccataggaacggcggaaacgccggcggaaccgatcagcgggttgatcttttccttcaggaacaggttcatgagcttggccagcagcacgccgcccgcggtgccgaaaccgaacgcgacgatacccattgccatgatctcaagggtctgaacggaaaggaaagtggtggcggtggcggtagcaccgacggtaaagccgaggaagatggtgacgatgttcatcagctcgttaccggcggtcttctgcagacgctccacaacgccggactccttgaacaggttaccgagcatcaggcacgcgatcagaggcgcggcagaaggaacgagcagcgccacgaacacggtgatcatgatggggaagatgatcttctcgcgcttgctgacctgacgcagcgggcgcatcacgatgcggcgctcttccttggtggtcagagccttcatgatggggggctggatgaccgggacgagggccatgtaggaataagcggcaacggcgataggaccgagcagctcgggagcgagacgggaggtgacgaagatcgcggtcgggccgtcagcgccgccgatgataccgatggaggcggactgctggtaagtgaagcccatgaactgggtgccgacataagtcatgaagataccgagctgagcggcagcgccgagcagcagggacttggggttcgcgatcagggggccgaagtcggtcatcgtgccgacgcccatgaagatcaggcaggggtagatgccgagcttgacgccgaggtacagaacgtcgagcagaccgaggctaacggtgctgccgaccgcccacggggcaagcaccgcatcggctacgccggcttccgacatctctgtcaggaattcctgcgtgatgggcgctcctccgaagagatcccaatggacgtgtcctccggcgaacaggatctcgtggaacatgtccgcaccgggaaggttggtgcacagcataccgaacgcgatgggcaggagcagcagcggctcaaagcccttcacgatggccagatacagcaggacaaaggaaatggcgatcataatgaggcatttccagttgccctcctgaccaaacatatagaagccggtctgctgcaggaaattgataatagcagtcatttatatttcttttcctttcacagttaatccagggggaagatgctgttatttagccgatgacgcacagaacgtcgccggggttgacagcagcgcccttggcaactgcgacggaggagatggtgccagcgcagggagcgaagatctcgttctccatcttcatggcctcgaggatgaacagcagatcgccttccttgacggcctgaccggcggcgaccttcacatcgaggatggtgccgggcatcgggctggtgacagtgccggcaccggcgggagcagcagccttgggggcagcagcgggagcggcggcaggagccggagcagcagcgggagccggagcggcagcgcgggcaacgggagccgcggcagcgcgggagacgggagcggaagccatgcggctgccgccggcggcggactcgacggtgacttcgtaggtggtaccgttaacggtgacattgtactgcttgatcatgtttgttctctcctaaaaataaaattagatttttttaatgttgacgatgttcatgctgcgggacgagataccgacctcttccgagagagcggcagtgatcgcggccacgatctcaggctgcatgccctgcggcttgggagccggtgcgggggcggcagcaggagcggcggcagcggcggccggtgctttctctttgcccttgaggatcgcacccattgccatggtgaggaaaatgatgcagatcaggccgaagaacaccgtgccaatacccatcagggtaacgaacaggctgctgtattccatttcttccttttacctttcaatttggattatagcaaagtgattgctcaatttgcaagcgcgtatgcactttttgcgcgtttttaacggcttttccctcctgccttgcacggcaggagggaaaagagactttccttactgcacggagagcacgtcggcaaacgcctggatggcggtcgccgcctggccgaagtcgcgcatctgctggtcgatgccgagcttgatgaaggggatcccagcggcgtcgagcgccttcttgaggtacgggaactccatctcctcggggtcgcagaactgctgcatgaacagcaccaagccctgtgcgccggactccgtgaccatgttggccacgaactcgccgcggcggttctggttggactgcggatcgtagagcaggacgtcgtagtcgatgttggtgaactgatcgacgagcgccatcatcgggtcgccctcttcgcttgcgtcggtgcggaaggcacgggactcgtgggcgacatcgtccgccgcgatggcgacgttgttgtccttgaagatcttgagcagcgtcgggttgtcgcagatgatgccggaggtaacgaccttcacgccgttccacttggcagcgggcagcgccttgagctcggcgttgagggccttgagcttctcggtgtactcggccttatccatgaaccaggcagcctttaagacggccgagcgcatgatcgggtcgacgacgtcgcagtggtcgcttgcgagcttgacgaactcacggcgggcagcgcgggacttgttgtagaccttgatggccgcggcgatgtcctcgctcttgatctcgtgaccagcgatcttttcaagaccggccttgacgttgttgtactgatccaggcagaactgcttgccccagtcggcaaagcggttctgaggatgggcgaggaagatgcacggcagcttctcactcatggcgacgcggatgttctggctcatggggcgcagcgtgtcgcagatggtcggggtaatgacaccgtccagcagatccatcgtgccgtcgagcagcatctcgaggtcgagctgggcgatggtgcaatagaaggtcgcgcagtattccttggagcgctgctcggtcttgttgttgctgccccacatgccgaacggcatcataccggcggcgtaaaccagctcttcgggggcgtaataaggcatcacgccgatgcactttttgcctgcgtccttataggccttgagctggcccttgggattggcggcaacagcggaaaattcattaacgatagcttcgatactcatttttgcacgcctccttagtctttcttgttggcttccatagcctcgaccaaaccctgtacacgggtcgtgtactgcgcttcgttgaagttgcgcgggtcagcctggtcgccgtcgaaaccggcgcagggcacgccaaggtcggcggtgaagcggcgctgcatttcagccatataaccggaccagggcttgcaggagcggttgtagtggacgagcacgccgtcgaccttattgtcgcggcagatgccttcacgccaggcaacgccctgctcgatgcagacggagttcggagccttgtagtaagcgcgggccatttcgtccatgttgttgtaaacaaagccgaacgcgggcgcgtacacgactgcggtgacgttgatgccattctccttgaggggcttgaacaggttcgggagcttcggccagcaggggatgccctcgaacatgacgcggtactgctcggggaagggcagcgtggaggtgccttcctcgatgttcttctgcaggtccttggagagcagctcgaaggcgtcggcagcagcttccttgccgcgggcggtgacgacgtcggccatgtggttaaagaggtcgaagccgctcatcggggcgggcttgtactgcaggaagtcgcagaccttcagccagttctgcgcggtgcggttcgcgtgcttgcaggcaagctcgaacttcttctcgtcgaacttcttgccggtgagcttttcgagctcatggatggcgttgtcgaactgggcgcggacgtacttgacagcggaatcgctgacttccacggtgttgttgtaggggatatcgaccatgatgagggggatgttgcacatacgggcgatattctcgtaccacttggtcatgcagttgcagatgttgttgcagcacaggacaaagtccggctgggggatgcgcatctgcttgtagggcttgatggcctcgcggcggaagttcttgtaggcgatctccttctcggtggtctcgggcagagcctcgatctcgtggatatcgtccagaaccgtgtaggggacctgcgtcttggggtccttcttgggcttgccggtctcaggatcgatgacgaccttgccgttttcgtccttgaggggcttgccgctgttggggtcgatgatgaactcgagcgtttcggggtcgaacttgcggcttgcgcgcttaccggcggcgtaagccagggagatacgtgcgtaaccgcagatatcgttgtcgaagccgagatcctcggcagcctggcacatgatctcaccgtcgcgctgggcggcaataccggcagcctggttctcgggatacatcacgttgaggtcaaaggcctcagcaagctcacaggggaacttggagctggaccaaccgaccagcttaccctgcttcttcgcttcacgggcgtcggcatagacgtcatcgacgaccttgcgcagagcaagcacgccgggactgacttgtttagccatgattgattcctcctaatgcgatatagaaaaatttgataacgaatgatggggattatttgttcttcaaagccttctggtaggcaaacagagcggcgccgagcgcaccgttatactgcgtgaggggcgtggtgtggatctcgtggccaagctgctcctgcagggctttcacgatgccgtggttctgtgcgacaccgccggtcatcaccacgtcgtcgcgcacaccgatgcggtggcagaggccggaaacgcggcctgcgacggacttgtggatgccgtggatgatgtcgcacttgtccgtgcccatggcgagctgcgagatgacctcgctctcggcaaagaccgtgcaagtcgagctgataccgacctccttggtcgacttgtcgccaaggtcgcccagttcttcgaccttcacctcaagtacgcgggccatgacatcgaggaagcggccggtaccggctgcgcacttgtcgttcatgacgaaatttttcatcatgccgttctcgatctcgatgaccttcacgtcctgcccgccgatatcgacgaccgtgcgcacgttcgggaacaggaacgccgcgcccttggcgtggcaggaaagctcgctcatctgcatgtcggcaaggccgtcaaggctgttgcgcccgtagcccgtggcaaggacgaagtccatctgctcgcgcgtcatgcccgcgttttccaacacctgagcgatcgcgcgggatggacccgacgtgcccgtgccgacagcgacgagggacttggcaacgatctcgctgccgtcctttaagatcacacatttcgacgcggtggagccgacgtcgatacccatggtataaatgctcattgtactctccgtttgccttcccgtgcgctgcgcggttcttgcctccgcgcagcgccgagaaaagcattgttgtgatattttactgcgcgttcagggcgtcgtagtcgcggatgacgcgcggcagaagcatctgatggaccgggcagatgctctcggggttctggtagcaggcgttggcgaaggcctggatgtagggacggatgtcgttcatatcgacgatctcgtcggtcaggcctgccttggcgcagaacttcgggctggacttcttggcgtagtcctggatcagcgcgttcatcttgtcgatggtgggctgcagatcctcgccggccttctcttccttcacgagacggcgggcatacatggcggccgcagcggtctcgccgtgcatgacgtagatctcggtggtagcggtgccgatggagaaggcgttgttgtcgttgccctgcgggccgccgaggacgtagtgcgccgcggcggtgcccttgcggagcgtgatctccatcatcggcagcttgctggactggatggagtagatgaggctctggccgaggccgaggagctcagcgcgctcagcgtcgttgccgacgtcgataccggtggtatcctggacccacagcatcgggatgcggtcacgcgcgcagagggtgacaaattcgttcatcttgatgaggccctgacggtacagcttgccgcccacgcccatcgcctggccgtaggtcgccatcttgtactcggggtagttcatcagcatgccctgatagttggcgacaacgccgacgagcagaccgtcgatcttggcaagaccggtgatcatctcggggccgtagccgtgcttgtactccatgaactcggagccgtcgaaaagacgcgcgagaacttcgaccatgtcgtaagagcgcttctggttgaacggaacgatgctgtagaggtcgttggcgtcgaacaggggctccttgggatcgtcgacgcggaagaactcgggatcgtaagcgggcagcatgtcgatgtacttgcggataccggcgagcacgccctcttcatcggcgtagacctcgcggaagaagccggtctcgccatagtggatggcgacggtgccggggatgtcgctcttgaggttcttctgcgccttgatgagcgcctcagcagcctccttgtcgacatggcccttggggctcataccgccgacgataccggcgccgccgactgccatgttggcgtcctgatgcgcgatcaggatagtcggggagatggagtgatagccgccgccggcggggttcgtaccgtagatgccgacgatgacgggcacgcccatctggttgagctcgctgttgcgatagaacggcgtaccgccgccgcggcggttggggtacaccttctcctgctcgtcgagcttaacgccggagcagttcagcacgtaaacgagagggatgcgcaggcgcttggccgtgtcgctgccgcgcagcaggctgtcagcctggccggggacccaggcgcccgcgagcttcttgttgtcgctcgcgatgatgacggcccacttgccgtcgatacggccgagacccttgacgatgccgacgctgccgttcttgttgtcctgggggttgtagaggctgttgagggggcaccaggtgccttcgtcaacgagctccatgatgcgctgcatcgccgtccactggccggactcgttgagcgcctcggtgctcttaccggcttcgagagcagcctcgcggatctcatggatctcctgctccaccgcctggatctcagcggcgttgtcctcgtggaatgcgctcagatccttgccgatgaccggcatgctctggaaataagagggcatggaatattcgctcatattaagttctccttcttaaatcgaaataacaaattacttatccttgggaaccttgatgaatgcctgacccgggtcgatctcctcacggatgaggcggatgatctccggagaggggccttccatcagctcggcgcgggagacgtcgatctcgaagccggtgttctcctgaaccatctcgggagaggagaacggatagtagtaagcgaggtacatgcgcttggtctcttcatcaaacttcatgatgccgaggtcggtaacgaccatctgaggaccgcggttgccgggcaggcccgcgcgctcacggcctccggggccgtccatccagccgcaggaggtgatgtagtcgacatggtccatgaagcggcgcttctggtgctgcatcatgatgatggtgttgcagtaggtggcaatgccgttggcgccgccggaaccggtgaagcgggtggtgggctgcaggtagtcgcccttgccgaaaatgcaggtggagttcacgttgccgtacgggtcgatctgcgcgccgccgatgaaggcaacgagacgatcctcgtcgtgcagccactcgttggcctcgaagccgacgaagcggatgttgggccactgcacggcgcagtgcgccatgaagcggttatcgccgacggagcggggaacctcaacggggtcgcagtccatcaggcccgactcgacgatgggatggcagctggggcagaccgcgcgcttggcaagggacgcaccgatcagcggaagacccgtaccgacgatgacgatctggttttccttaatattcttagcaatggcataagcctgcatttcctgttttgtgtacttcgtataatcagacatttctatttagcctcccaaaccttaatgtgtagtggaatagccgaggtgcggctcgttcttcaggcgcatcagacggctgccgccgagcttatcgagcagagcggactgatcttcgcagctgtagacccacttttcaaggaaatccttgaaggtctcggggatcttctcgccgctcttggcgagctcgaaggccttctgggcgttttcggcggcgagcttgagcttctcgtcctcgggagccttctccagcgccttggcagccttggccgcagccttttcgagctgcttgacggcatcctcggcatcctgatacttggaggccttgtcgtattccttcaggccggcatcgtcgtcatcatagtaggcatagcactgagagggccatgcgccatagggagccttgacgaccgcctgcacgcactcgccgaagatacgggtcttggtcgggtcgcggcggatgaactcgtcggagacgatctcctcgcaggtgacgatggtcttgcgcgcagcgatcgcaatgtcgatatcgtggaactcgtcgccgcagatgatgcaggtgccgtccggagaggcctgctggacgtggatgatcgcggtgtcgattctgggaacgggcacggcgacgaccttctggccgggaaccatggggttctcgatctcagcgcacttgagatcctcgatcttgggcatggtcttgcgcttttcttcgctgatgccccagaacttcatgaggccgctgccctgcatcaggcggaccggcaggaacggaaggccgagagaagaggcgtggagcatgagcatcagcacgtcctgagaatagtcctcatacgtgagcttgccctgctcgatggcagcgcggaagcggcgggaaacgttggtgtagccggagttagcggtgtagcagttgatgtaagcagccacgcggccctcgccgatgagcatatcgacttcgccgccgccggggccggcataaacgatgaagtccttctgaccctgacgcaggatctcactaaccgtggcatacggcttacggttggtggtgaaaccgccgatcgcaagagtatcgccattctcgacgtactttgcaacggcatcgtgcagtgacatgaccttattcaagataaaaccctccctgattttgataaacatttttatcgccgaagagccctctctgcttgcatggattccgtcaaaaatccgctgaaagatgctcatacaggcttcagtgtaaattatagaggaacttcctcgcaaaatcaatgaaaacccgcatggaaagtgaaaaaaaactgaacaaattttgttctcgctttttgtcgtttccgtgtagtcatttttgtcttcttctccaaaatctccaaatcttgcaagaattcttgcaagtttccagctcattagcgcaaaaaagcaccggaggggctcccctccggcgctttcatttgccattctgtcatttgccgcgctgcatcgcgtcgtagcgccgcatcagcacggccatctgctcgcgcgtcaaaaagctgcggtactgtttgttccccgcctcgtctcccgcgatcaggccgtttttctccgcccaggcgcgcgcctccgcgctccaggacgccggcgtctgctgcgccagtcttttcaggtagttttccatcatcgcgtcaaactgctgctgcgtcatctcttcctcctcatagcgcggcatgggcggcggatagcgcttcgcgcggatcatcgcgctcgtgtacactccgcccgcatcccactgaaaatgcggccggtcgggaaagctcccccagtctcctccccaggaaaatccgactcgctttccgatctcccccatccgcgcaaaaaacgcgggatcgtcatactcgtgccccacctcatttttgcaaatgtcaaaggccaatcctgcatgctcggcgtggaacgacggcgtcaccgctcctttggccgcgtagcccttctcggcgagcatccgctgatacgccgcgtcgcgcaccgtctccgtcaccagaacgctcagtccctcacgctcagcaagcgtgagcagcgtccggcaattctccgccacgtccgcgcgcaggtcgctgatgctcctgctgtggcgcatttacgtttcctcccgcgcgtttttgccgttctgcgtgccgaaataaaacgcgatcaccatgagatacgccgtgttgaactcctgcgtcacctttgcctgcaccgtcagcacgcagaacgtgatcgtcaaacacagcgtcacgatgctcttcacgctcaaaagattcgccagtctctttttcaaaagctccatgctctctcacccctcgcagtcctgcccgcggcacaccgtttcatacgtcacgccgcccgccgtattttccgcctttgccttggcatagtagcacgcggcgctcgtgccgtaagctccccacgccgccgtcaccatcgtcgcgatccacgggagcgtgcccataaagcccagttcgatcgcgagcttcgcgatcccgaagccctgatacgtcgtatagagcacgatcgcgctttcgagcagcagcaacagtttggaaaagctcgtgcgtttccttttcataagctcccccctgtcatcagcagggagatcgccgccccgatgagcacgtacagcacgcggtcgatcatcgcatcccagcgctttccgcccttctgcgtgatggtcttcacgtccgccttgatctccttgacgtccgtctccacgcccttttcgcgcgaggcgagcacctccactgccgttaccagcttattcaggtccttctgctgctgttccagcttttcgatgcggtgcgtgttcgacttggcgcgctgctcggtctccgtcagcttgaccgagatctcctgttccgtcattcttcctccggcaccgccttttcaaagctctcccacgtgtggtgcgcgtcctccacactctgccacgtgaatcccactctctcgcactcgagccacgtcagataccggaagtagaactccaccagcaaatggcacgggatgatatcgaggatgatgctctccacctgtgaaaactcatccggcacgcccacggtgttcgggaaccagaccttgaccgtcccctttttctccgtctcctccgccagtgccttgatgccgcagccgctgagcgtcgagttgatcgcatccagcgtgaagctgtcggcgttgatgcgcgcgagcgccgcgatggcctcgcgccgcagcgcagtcgaaacgctgaccgggcagcgggaaaagagcttctcccgccttgcaaggccctcgccctccgccgtctgcaaaaggccctcctgctcggcgtattccgtcgcgccgtccgctttatccagcgctttgcccgctgcgtacagctctccgccgctcagcgtgccgcgctcggtacgataaacgcgcatcggctccaaaaggcggcagagatagtcataatacatcatgcctcacccgccccgatctccgtgatcgtcaccgtgccgagcaccggtagctccgtcgcgctcacgctcacatcctcgtccggcgtgagcaggtgacagttcttcacgccctccacaccgtagaggatgctcgcgagcttcgctgtatacaccgcttcacccagccgctcgccggtgaagtacgcctgcagcgccgccgtcgccgcatcggtgatctcctgcatcgtccagccctgctccgccgtcagctccgcgctcatgttgacggtcttctctgtcggcgccttgacctccacatccaccgcgatctcgcgctttttctgcaagaccgcctcgatctcgccgagcagcttctcatccggcgcgcccgcgtgcgtcgaaacatacacatccaccgtgccgatgccgcgggcgcggccgaccgctttcgccgccgccacgttcggaaagctcatcgcctcctgctcgtaaaacgccgcgttcgcgccgttcggcaaacgcttgtagctctcgagcacgcgctcgcgcagcttttcgtcgctctcctcgtcgctgccgccggaaaacgcctcaggatttgtgcactgcgtgatgcccaccggatacacggacatcagatggatcgcgcccgcgatggcgttgccgctcgcccccgcctccacggcgctcgccggcacatccacatacgtttcgccctttgcaagcgtcgccttctccgtcgtctcaaagcgcacgccgccgctcgtcatcgcgacgctcccctgctcgatctcataatccgtcaccgccgccgacggcgcggaaaagcgcagcacacccgtcgccttcgccgcgggaaggcgcgtcagcgcccgcgtctcggcgtgataatcaagatactgccccaccgccgtctgcggaaagctctgatcgagcacccagtccgcctgcgccagaagcgactgtacctcgctcgccagcgcatagaggcgcaccatcgcgtcgcagccgtcgttcggcacaaagcccgcctcctcggcaaagatcgcgcgcatccgctcgtagatcgcgttcagctcttccattcttcactctccccctatcgtcacgaccgcctcgcccgtttcgttctcatagcgcagcagcacgcgcagctccaaaaggccattcttttccgcaagctccatgcccgtcacgctcaggcccttttcatccgccagtgcctcggccacgtattgctttgccgccgtcgcgcggctctcgcccttttcccgccataaaaggtgcagcttgctgccaagctctggcgcgagcgcaaagcttccgcgccgcacactcagcttaaagagcacgcgttcgagcagctcgtcccagccgctcacgcgcacgagcccgcccgcgccgtcggccacataatcgcggtctttgatcttcagctccatcctcagcctcccattcccagatacggcatcccgttgatgaaaaggagcccgttgatgtcgatgcgcccgttgttgcgcagcacgatctccgtccccgccgcggcggagcgaatgcgcacctcgccgggtgccaggtcgtccgcgctctgccccaccgcgcccacggcgtaggcctcctcgccaaaggtcccgccgcgcaccaccagcacatcctcgccctttttcggctgccactcatagccgccgggcgcggcggtcttcacctcgcgcttttccccgctgctgaacaccgccagctcgccgccctcgaccgtcaccgttccgtcctgtgccgaggccacgtcctgcatctcatgctggcttagctttctcgatagccacatcgtctctcactccctctgcatcgtcacttcgcacgcctctccgctctcgccaaagcgcctcacgcactcgatcacgcggaaatggcctgcgatgccgatcttcgtcccgctcaccgccgcgatatcccccggcgcggcggtgaaccgccccgcgatcgtcacgcgcagcgtctccgcgccctccttcgactttgcgatctgatactcccccgtgtagcgcattgcctgcgtgccgctgcgcgccggcacgtaaaatacgcgcctgctcgtgccgccgcgagcacagaacgcctcgtttttcacgctctgcttcacgcccgccttgctgtccaccaccagtgcctcggcgatcacgccgtagcgcttatcgcagtaggaaagcgccgtcaccggcgttttggcatcgatgctcacgcgcgcggccttgcggtttttcttcacctccagcgcgcccgtcttgtcgaaatacggttcgattccgccgtgcagcgccgcaaaatcgttcagcgccttccactggctcgacccgttcgccacgcggtaccgtgccgcagccgtcaccgcgtcatagcccgtgcacacaatgccgtacggcgtcacatggtttttgaggatctcctccatcgtcgcccactgatagctcacgctctctgcctcgttgtcgagcagcagcgccgccatgccgcgtccgctcacctcaagctgcaagcccttttcatcgcatgtcacgccgcactcgtccacaacgcccgcaaattcgaccgtgccgtcctctctcgccgtgaagcgcaccgcccgccgcagcacctccgccatcgcgggctcatacgcgcacttgagcgtaaagctgtcgcacggcacgcttcccgtgtaggaaaattcccacttcagcagcgtcggcagctcaaactgcgcaccgtcgcacgtcgtcaggtaccccttcatcacggcagcgtcacccgctctcccacggcgatcccgttgggatttttgatctgcggattcacgttcaaaagcgccgtcagcgtcacgccatacgtgttcgcgatgccccacagcgtgtcgccgcgcttgaccgtgtagtacgagctcgccgttttcgtccccgtgcccgcattgccgctcccgccgctcacgcggatgagcgacgtatcgagcgggctcgtctcccagaaggcaaagcggtagcgcacgtagttttcaagcggctgctgcgccagttccagcaacacaaagtacgcctgcgacgcctgccacaccggatggatcagcagccccggcccgccctgatagaagaccgatgccagctttttgaactcgtcgtaggcgcccttccccgcaaaaacgccttcgccctccatcacgcggtagctcattccgagatcctgcatcccgtagcgcccgaacggcaccttcgccactgccacctgccgcttgaacgagatggtgtaggtctctgggttgtgcggccagacataatccttgtatcgcatcggtgcaaggttcatcctcccgcccctttctcagtaaaataaaaatccgccatcgtatcggcgcgcgtcgcgctctaagctcagcgaaaacgactccatctcatgcacctcctgctcctgcgcgagtgaaaagtcatttttccctcgcgctgccgccgcgctcgccccgtcgcggccgtccgcgctcaggagctttcttatccagtcggacgcattgtccgcgctctcggcctccctcgcgcgcagaagcgcagcgttcgccgccgcagtgcccgccagatcggcagaaaacgctgtctccctctccgagccatcatcttcttgcgtcgcacccagcccgagcttttgcccaagccgcaccgccgccgtctccaccggatcatccgctgcttctgccacagtttccgcgccgccgctcatctccgcatcctgcgccgcggcttcctcttccgaaagctgcgcctccgccgcctttttctgcgccgtcccctctggcacaagggagaggcgctttttcagcgcctcttcccgcgcgcgccacagctctgcgcctctttgcagcgcccattcgatgtaattcaaggttttcgcccctccttcatgcggataaagcgcgccatatcaaagctcgcgttgccgccgcctgcggcctcgccgagctttgcgccgcaaatgctgcatcgtgcctcctccgcgcgcgtccggcactcggggcacagccgctccatcgcctcctcgcggtcgagcatctcgtgcacaaggcaatagaggtagtccgcgtccgtcatctcctgcgcgcgcttttcgctcggcagcgcgccggcatatcggagcacacgccatttcagccgttcgtagggcgcgtgctccatgctttttttagcgcttccaccttctcgcgcccgtcctcgctcgacgggttctccgccctgtcaagcagcgcgtagcaccgcaccagctcgttgatctcgccgacgctcagtgcattttcaacgtcctccgcgcttgcaaaggccgcctctccgccctccgtcaggcttcttttgagcagcgccgcgttcgcgcgcaacgcacgctcttcttcgtcggcgcagtcaagctgcgcgatctcgtgccgcagcgagagcgtctcgcgggccgaaagcagccgcatcgcgcacgttctctccccgatgcgcaccgtcttctcccgctcgcgccccaaaaagttcatcagaagctcgtccatcagcttgcgatctccatgcgcttacgcgcgatgatcgtcaccttctccgccgccgggtcgccgagcttgcccgcctcttcaatgctgctccagcggcactgcgagtagatgatgcgcttgtccggcttgcagatcacaagcgaaaagtcgttcagatcatagaagttgatgccgtcgctgatggcctcatccgtcgcgtacaggcggctcaactccagcgtgtacttgttcgcgcccgcgatcgtcgccaccggctcgttttcgccaaaggcctcgatctcgcggctcgtgcgcgtcgctctcgtcgtgtagctctgcaccaccgccacctttttgccgtcgacttcgagatagatgtcgctgctcagcggcaataccgtattcgccatatttttcctccttacaccgtgatgtgcgccgtcagatagatgcggttcagcccgtgcgccaccgtaaagctgaattccaccaggcacaccgtcgggtcgctcttgagcgcgctcaccagcacctcgccgtagctgtccacgatctcgcggctcttcatctcttcgagctccagcaccacctgcgagcggatggccccgcggctctgcgcggtgttcttgcttctggcaaagcgcgtgcgcagcgcgctgcggatcgtcggaatgacctcatccacgatcaaaatggtcgtcagctcgcgccacgtcgtgtccgccgccccgccgctcgaagtcttcgtcgtgatacctcgcaccggcgaggaaacgccgcccaccgtctcgatcggcgtcacgccgccgcgcaccagctggtcgatctcattgtcactcagtctcttgcccgccgcgccgaaaagcgtcagctccgcgccgttgataggcacggacgggtcggtgtttcccgcgatcaccgccgccaccgccgccgcggcaaacaccgcgctcatcgtaccgccgtcgtccgatgcgatatccggtcccaccagcactacgcgctcgctgttgacagccttcgcgcggttcaccatctgcgcgaccgtctcttccgaaccaccgatgaccgcgatgcgctcgcgtctcgccgccgaggcatcctctgccgccgttttgaggagcagatgcacgctctgcgccgcgctgtcgcacaccatcacgccgacatcttcctcatcagagagcgccgcaaacgcgctcgcgtagtccttctcttcactctcgtccttgcccacggccacagccttcactgcacccgcgccgttggcgaagaggaatttgagcagcgtgctcatgccatacacgccgctcgcatcctccccgaatacgctctttccctcttcatacgaggtgatgagctccaccttattggccgtccccttcgtcgccaccgctgccgcgccgatcgtcttcgccgcagcgctcgcgctcaccacgctcgatgcgtcgtaggacgaatacacgcccggccgctcatggatcgtactattcacgttctttcaccgtgcctttcaatacaaaatcggtaaacaccgtcccatcctccgccgcctccgcgacaaagtatgccgcatatttcgcgctcgcatccagtcggaacattcccgtcgtcttgtcccagccggtcttgccccactgcaatgttctgagcttcagcccctccggcagcgccgtcatcatcgcctgtgtgatcgtctccgccgcttcctcgcagcccgccgcgcccagcgtcctcggcgcatacacctcgatgagcagcgtcagcagcatttttctcccgtagacagataccgtctcctgcgtcgcctcgtcgaccttttctcccagatactgggccgcgccgctctcctcgatcaccgtctccttcgtgccgaccgccgccaccgcggtcgcataccgcttgagctgttcttcgctgtaactctcgatcgccgcgcaccccgccgcctcgatcgccgcggccaccgcgcgcttcacctgtccgaccgccgtcatgcctcttcctccttcggatgcagcatcgcccagtagtaggcgatctcctcgcccacgtaaaacggccccgccgcgcgcacgacataccgcttctctccgcactgcacaaagtcgcccattgcgaccgcaacgtccgccgggcccagataccgccagcactgctcgtcgaccgctcccagcgccgtcacagagaacggctcctcgccgttctccttcttcacaagctgcaaaaacgccttcgtctccgccgtctctccgccgtgcagcaccaaaacgctcatgccatagcgcgcgaacgcctcactcagtgcccgattcatgcttccaccccgcggaagcagaacccgccgtccgtcgtatacggacgcatcagcgcccacgcctgctcacgcagcagcgacagccttttgctcccctcatcggacgaacgcttcgtcaccgtgagatctcccgcgcgcagggaggagaactcctccccgcccgctctcgcgctctccagcgtggccgccgccaaccacgacgccgcgcagataaacgcgctctcgcagtcctccttggcgacgccctctttcagcgcgcgcacaaggctctcctcctgcgccgtgcagatcattcggagcatgctcttctcgctctcgtccgccttgctcagcgcacacgcgatcgaaaagatctgctcgctcatgctctccgccattcgctcttcctccttactttttactgtaaggacagcaccttcgaggcctcctgatacggctttgcaaagccggaaatgctcgtgatggccgcgcgctccagctggcggtcaatgagcttgtcgtactcgaccagcacctcgctgccacagatgcgctcgagcgcatagttcttatcaaggccgatgatcttgcccgcgggcatcgcgctcgtgcgcaggagcttcgcacccagcggggtcgcgagcgtgcccgtgccctggaagttgaggcccgtcagcgggttctggaactccgagagcttgagcatcgcgagcatcatgtcgctgcccatcagcatcgtgttcatcgtataggggtcaaactgcgaccagaagcccagcagcgcgtcatagctcagcgtgcccttcgtgccgccgatgccgtcatcgccgatggtatagcttgttgccgcattgttgttgccgtcgccgttcatcaaaacgtcgatagcgtcctttaagtgcatgcgcgcgatgtacgcgccgatctggcgcagcgtcacagagaagaggtccagtcgctggaagcggatagcctcataggacgcgaccagcattctgccgcgcttgtggagcttcacgagattttcctgcgtgcggatgctggtcgtcgggatgcccgcgccctcctccacgcgcttgagctccttgtcgtcatccgtcggaacggacgcgatagagcggtagtccatgccgtcaaaattcgtcacggtcgcagtgatgtcgggcaggatgtcgctttccatgccctggcgcaccacgcgggagacgaactccgggaacagcacggacgattcgctcgtgtggaaaaacttttccaccatgtcgctgcccgcgcccttgacgtggatatcaaagcgcttgagctggcgctggaaggcgtcgagtccctcgagcgccgtgcccttgtagttctcgctcgggtcgagcgattcgagcaccttcagaaagctcttgccgctttgaccgtacatacccttttcgagcttcacattttcatactgataagccatttgtccttctcctccttaaagcttgatgacagccttgcccgccgcgctgtccacgctcagcacaagatagctgctgccgttctggttgtcgcccggcttgctcacgccgcccgagccgtccgccaccagctcgctaaagcctaccgcaggcgccgtgccgctgtacttcacgctcgcaaggccgccgagctgcaccgtgcaggccttgccgtcatgcgcgacggcgcgcaccacgccgcagaagccgtcgcccgccgtgcaattgcccaccgtgccgttcgcgctcaccttcacaatgtcgccctcgctgaccgcgccgcaaacaaacgttgcgcaccactcgccgatgccctcataagaaatgctcataccgttcctccttgatctgttgttctatccaaaaagcgccgctgctttttgttccttttcacacgcgaaagtcgctctcgtcctccgccgctttcgtcttctcgccgtaagtgagctgcgtgcgcagccccagctttttcgccatcttcccgcgatacagcttctccatctccttgagctcgctctcgtcgagcttttccgcgagcttttcaatggcctcgccatccgcctcctgctcgcacacgagcatcagccgcttcacctcgccgcgcagctcactcaagtagcgcttaccgacctccgcctgcttttcaaggctttcaagctctctctggttcgctctcgacccgcgccgcttgacgagcgtcttgagcgtgcccgcgtcctctccgccgcagcgcttcaaaacgcccgctctcggctgcgccggcaccgctacaaagctccactcatacgcgtcctgcgcgttcacaagctccgcgcagcacaccttgccgccgtacacttcgccctttttgtgcgcgcaggtgttgatgtcctcaccacagatggagcacacgcacctttccacgctgcaccccacgctcacttcctttttgatgccgccctcgatctgcgcgatcagcgcatcgttctcgccgccgcgcagcatatacgcatagcccttgagatagcagcgcccctcgccctgcgagcaaacgccctcttcctccacgatctccgtgcggtagatgcgcgccgcctgccccttcgccgtccactcgtggtcaaaaatgccgcttttgcccacaaacagctccgcgagctcttcgagcgtcgcgcgcggaaagcgctcgccgtcccggtccacctcgttgtcgcacagccgcacagcaaaggtgtagacctcgtcctctttgagcgcgcgcttcgtgaactgattgatgattgccagttcctcgcgcgtcaccatgctgtttttgagcccattgctctcttttctcacttccatgctcatttcccctccgcttcatcattttcctgcctgagctttcgcgcctgctgcaagtagagtgccgctttggcctcctccacctcatcctgcaggttgatgtcctcccagtccaccaccgcacggcagccgtagccgtgcatcctaagccacagcgtacagacgcgctcgatgaccggttcgagcgtgcgccgcagcgccgtgatctcgcttgtcagcatatccgcctgctgcgagctcatccgctcggtcgacgaccagctcagccccagcataaacggcggcagccccgtcttcgccaccagctgctctaagatctgccgtaccggcgtctcgctgtcgaggatctggttgtccgcgccgatggccttgatcgatacatcgcccaccgatacaaagtcgcgcacgctgccgtttctgccctcctgcatcgcccgcgaccattcctcggcgatctgctcggcgcgctcctgtgccgccccgcggtcgagctcgccgtcctgcggcttataggtcaccgcgaagcgcacattgccgcagcggtcccagttctttcccatcgcgtcgtaaattttcagcagcagccccgttaagtacggcatcgagcgcagcatcgaaacgccgtaagggtgccccgcttcggggttgagcggtgtaaagagcagtaggtcctgatactcgagcggcacgctgcgcccgccgccatccacaccgcacaggcagaattcgagcggattgtccccctcgcgcacctccacctgcgaaacgtccgcgcacagcaccgccgcgatctcgcgtccttccgcgtccggtacgatctcgcccaccgcgcgcccgcaggtcaaaagcgaatcgaggtaacagtccaaaaaggcgttgatgcccctctgccctctgcccaccggtacctcgcgcaaaaagcgctgcaagccctgctccgcccgctcgttgccgcatgccacgcgcacgccgcccgtcagccggatcagcttgcagatggccgcgtccaccaccggcaccgcctcgcgcacctcgcggtacagcgctgtctccccgtccagcagcggcacatagctctcaagccgtccgaatgtactgcgtccgccgccgcgcagctgcacggcggtctcgccgcccgtgcttctctccttctgccagggtactttcatcctgtcctctccttttccgttttgttcatcgcgccgcgcgctccaccgagcgcatcgcaatgccgcctccgcgttcctttttcgcgatcgacacggcaaaataccgcatctcatccatcgcgtgatctctctcctttttcggccggtctcttcccgttccgctgtcctcccagcaatacgccgcgatctcggcaaggcagctctcgcagccctcgcagatcacgatctttcgctgcttcaataggttcgccgtcacgcggatgccgtccgccacatcgttgtccgccttgctcacggggaagccctcgcgccgcagcgcctcgataaagctcgccgccgacgggtcgacgatcaccttttccaccgtctcccccgctgtgaactttttaaggtccgccacatactccgcgtctgtcttctgccgcccctctctgcgcgaatcgaagtaatactccctcacccggtaccacaccccgtccttgagcgcccacaggccaaaactcgtcggattcaccgtcccgtagtcgatggagatcctcgcccgctcccacggcttttccggcacccgcccgcagtactcctgcggcgcgaagaagtcatagatgagccccttcgccgccgtccactcgcccaggatgaaccgccggtaaaatgtcccgctgtatgccttttcgtaccgcgcccgaatgcgcggcgagagcgacggattgtcgtccatcgtaaagtgcagatacagcgccccgcgctcctccgcgcgcaggatccactcgcggtagaaccagtgcatcggcccctcggggttgcagttgaaccacagcttgctgcccgatacgctgcatcgcgcgctcgcctgctccacaaacgagcgcggcatcagcgccgcctcgtcgaacagcacccccgccagcgtcacgccctggatgagcgccgcgctcccctcgtcgtatccgccgaagaggtaaaagcggttctcccgtccgccgcttcgcacgatcactaaattctcgctccgcttctcctcgcagtgaaagcccagtgccgtcaccttcggtaaaatctcgtgcagcacatttcgccgcagcgacacgatcgtcttcccgcacagcgcaaattgctcgccgctaaagcgccgcatcgcccacaggaaaaagcccatccccatcgacagcgtcttcccgcttcgcaccgccccgtcgcagatgatcgcgtcgtactctttgtacttggggttcgcccaccaggtcatcgccgccttctgcttggcggaaaactgcttcacggccgccaatcatctctctcctctcccgcctgctccagcgcctccaagaactccgccgcctcgttcgcgtcccccgtccccagcatctcgtaaagcgcgctcagcgccttcacccggtcgacgaacttgacctctaccgtcccgttggcgtttctcttgaattccgccaccgccgacaagtccatcttgcggatcaactgcgccgtcggctcgctcagatacgtcagttccacgccccggttcacccgtccgaacgcgatcttcttgagcgcctcaatcacatcctcgcgccccagctcctttttctccatcgtgtccccccattttgttttctcttttcacccgaaccccgccgcacccgttttgttgcacagtcgtatgcacgcgcgcaaaattttgcgcgcaaaaaatgccgcgcaccgcgcggcagtaaaaaaaggggccattctctttcgcaaaagagaatggcccccttgaacccccaagagaaaggttttaattggcagtctcaggcttgaacggtctttatgcctccggaatgaaaatgcctgccaggtgatggtgctaaacgatttggcctgctcctatcatccgctgccgctctgctgatcttgtagaagtgcacagtaatttccgtctaacggggtactactcaatgcggcgagcgcagcaatgccgcattcggcacgcagtctgccgccgttctaccgtcactcgcgcctcacggtagtaaggcgcggttgcaagacgtaacgaaacgtagggattcatggcgaagccatgtacaccgcacttacattgcgcagcgcatgcagtcattcaagcccaaagctgccaatgtgcggggtcaaggggcaaggccccttgcgttctcttgggggatttaaagggggccattctctcacgtgagagaatggccccctttattcgcacccctgcgcggcgcaggggaatcccctcccagcatgggagacaatcattcgagaatgagcttttccagctcacccgcatcatcggcgatcatcttcgcgccggcttcgatcacaacttccctcgagcggaaaccccagctcacagcgatgacgtccagtccggcgttcagccccgtctgcacgtccacttcggaatctccgacaaacaccgcgtcttttttctccacgcccagcgccttgagcgcttcctccgccatgtcggggtacggcttgcagcgcacgccgtcgctcgggccgacggcaaagtccatccggtcgccgaaatactcacggctcaacttctgcaccgcgctgtccggcttgttcgacacgaccgccagcttgatgccctttgccttcagctcgctcagcatgtccaaaagtccgtcgtacacccgtgttttgatctggcagtggtcctgatagtacgcgcggtacgccgcgagcgtctccatgatcttttcctcgctcgtcccctccggcacggcgcggcggatctgcttttccgccccgttgccgacaaagcgccgcatctcctcaaggctccgctctggatagcccatctgctgcagtatatggttcgtgctgtcgcgcaggtcctccagcgtatcgagcagcgtcccgtccatatcaaaaagaaccgctttatagctcatattcttcctcttttcttattttgttgccttattataatctgcttcatgcacaaagcgcaaccccgtttttgctcatatctctccgtctgcacccttgcgccccctcttctcctctgatataattattgaatgattttatagataaggagcgctgtcatcatgcatgaactggaacgtctctatcatatccactgcgccaagggcgagatcggccgctatgtgatcctgcccggcgaccccggccgctgcccctccatcgccgcgctgttcgacgatgcccatctcgtcgcgcagaaccgcgaatacaccacctacaccggcacgctgctgggtgaaaaggtctccgtctgctccaccggcatcggcggcccgtccgcctccatcgccatggaggagctgcatcagctcggcgcggacaccttcatccgcaccggcacctgcggcggcattgacttaaacgtcaagtccggcgacatcgtcgtcgccaccggcgccatccgctacgagcacacctcgctcgaatacgcgcccatcgagttccccgccgtcgccgatttcgacatcaccctcgcccttcgtcaggcatccgaagagctcggctactgcacccacaccggcgtcgtccagtgcaaggacagcttctacggccagcactccccggaaaagagccccgtctactacgagcttctgcaaaagtgggagagctggaagcgccttggcgtcaaggcaagcgaaatggagtccgccgcaatgttcgtcgtcgcctccgcgctcggctgccgctgcggctcctgcttccacgttgtctggaaccaggagcgcgaaaaggccggcctcgatcaggacatgagcgaggacacctccgcctccgtcaaggtcgccgtcgaaggtctcaagaagatcatccagcgtgaccgcgagctcgccgcgctcccgaatcacgatcaaaagctgctcgaaaagaaagaaaaggggcttctccatgagtgataaaaaggtcatcggtatcctcggcggcatgggtcctctcgctaccgccgacctctttcagaagatcaccctgcacacggctgcctcctgcgatcaggaccatccgcgcgtgtgcatcgactccaataccaatatttccgaccgcacggcagccctcctgcacggtggcgccgaccccgtccccgaaatggtcaagagcgcgcagcgcctcgagtccatcggcgcggatcttctcattatgccctgcaacaccgcgcacaacttttatgacgccgtcgcctcgtccgtctccatccccgttctgcacatgatcgccatcacgcgcgacgcgctcaagtcccgcggcatcaagtgcgccggtctcctcgcgaccgacggcaccgtccagaccggcatctaccagcgcacgttcgagggcagcggcgtcgagctcctcacccccgatcatagtgaagatcagaccgccgtcatggacatcatctacaacggcgtcaaggccggcgacctcacgcacgacgcgaccgccttccgctccgcctgcgagcatctgctcgcgcgcggagccgaggtcctgatcctcggctgcaccgagctcccccccgcgttcgacatctatcatctcgattaccccaacgtcgacccgacgcttgagctggcgctcgccgctgtccgcgccgcgggctgcgaaaccaagtgaggagacgcgcatgagctacgccgatcaggtctttcgcgccaactgcctcgacattctccaaaacggcgtgcgcgacgacgacctcaccgtccgtccccactgggaggacggcacccccgcccacacgatcaaaaaatttggcctcgtcaaccgctacgatctgcaaaaggagtttcccatcctcaccctgcgccgcacatacctcaaaagcgcggtggacgagctcctctggatctggcagaaaaagtccaacaacgtccacgacctctcttcccacatctgggacgcctgggcggatgaaacaggctccatcggcaaggcctacggctatcagcttggcgtcaagcaccaatacaaggagggtatgttcgaccaggtcgaccgcgtgctctatgacctcagacataatcccgcctcgcgccgcatcctcacgagcctctacaatttcgaggacctacacgacatgaacctctacccctgcgcctactccatgaccttcaacgtctcgaacggcacgctgaacgccatcctgaatcagcgctcgcaggacatgctcgccgccaacaactggaacgtctgtcagtacgcggtgctcgtccacatgttcgctcaggtctccggtctcaaagtcggcgaactcgtccacgtcattgccgacgcgcacatttacgaccgccacatccccatcatcgaaaagatgctctccgagccggagcaccccgccccgcagttcaccctcgatcccgccgtgacggatttctacgccttcacccccgacagcgtccggctggaaaattatcaattcagtccctttgaagacaagatccccattgccgtttgagcattcgcgccggcaaaatttatagagaaagccatggagttgatactatgaccgcaatcgtctgcgtttcccagagctggggcatcggccgcgacggcgcgctgctgttccgcatctctgccgaccacaagcgtttccgcaccctcaccgtcggcaagaccgtcatcctcggccacaagaccctcgacaccttccccggcggcaagcccctcaaggaccgccgcaacatcgtcctctcccaccgcgacctcgacgtccccagcgcagagatcgcccactcgtttgacgaggccgccgccctcggcggcgacgacgccatcgtcatcggcggtgccagcgtctacatggcgctcctctcccgctgcgaccgcgtctacgtcaccaaggtcgacgccgacccggacgccgacagcttcttccccaacctcgacgacaatcccgactggcgcatcgagtcggagagcgagacctttgaggaaaacggcctcaagttccgctatgtcgactatgtccgcaagtaaaaagaggggccttggcccctctttttttgcgccctaaagggcatgcggaagcagcgccgttggcgctgcacgaggcaaagggggctattctctttcacgaaagagaatagccccctttaaatcccccaagagaaaggtttcgattggcagtctgaggctcgaacagcctttatgcctccggaatgcaaatgcctgcgcgcggcttcgccgcgtttggtgttgctatacgacttgactctctcctattatccgctgttgcgcagccgttggcagctctgctgccttacggatgcggcacaccccttgcgggtgccgctctgctgatcttgtggaggtgcagcctaatctccgtctactttggatttgtacgatcttgctactgcctgccaaagcggcattgctgcgctcgccgcggttaggtggtgcgtttctcgcggggatagggttctttttcgtcggtcaggccgacgagatagtcgatgcttgtatggtagaatccggcgagctgcccggcgtattccagcggaagcgctcgctcgccgcgctcgtatttggaatagagcgactggtcgcacatcaaaaattctgcgatctgcttttgcgtgaagtctttatcctcccgcaaatcacgaatccgtaacttcatttacatcaccactgcgattatatcgtaagacaatatgtcctattgactttttggacatattgtcctaaaatgagcattgaggtgatttcatggagaagcaaacctgcaatgattgcgagcattttcgcagacattatatctttaccgatggagaatacagggcattgtactacggtcactgcaccagcaggcgctgcaaaaaacgagaggcggacacccccgcctgtgaagattttactctcaaaccacccccacccaaagaccccgccaaatactacattgcccacatcaaactaattccagcagaagactgaaaagcgcggcgagcgcagcaatgccgcgcccgcaggcagtctgccgccggtccaccgtcactcgcgcctcacgatagtaaggcgcggttgctgaatgaaccgactcgcagagactcgtggcgaagccacgtacaccgcacctgattgcgcagcgcgtgcagttcttcaagataaaaactgccaatgtgcgaggtcaaggggcaaggccccttgcgttctcttgggggatctaaagggggccattctctcacgcgagagaatggccccctttgccgcacccctgcgggtacgcagggaaaagcacgcatcgctgtcgcgctgcatcacgcgcagcggaacgcttccacagccgtcccatccgcgcagcgatacagccgcccgccctcggcgtaaaacgtctcattcccctcgtcgcattcgacgttccagcgcagacgccacactgtctcggctccgttttcgtcatagccctgccagccgaagcagctgacctcgttcagcgctttcacgttcctcccaagccgcagtgtcaccgtgcagtcgacgatcttcgcgttcggatagtccttttccgcgtccgccgcaactttttcgtcaccgaagacgacctgggtattccatatctccggcgcgttcagcgcaaacgccgtcggcacaccgcggccgatatacccgccgagcgccgtcaccttatagccgtgcacttcatcgggaatgacgatcaccgcgccgtcgctcccgtcccagtcaacgtccgccgcaaaggcttgatgcgtcaccaggttgcggtagtagcgctgcccgtctgtgtctatccagtccgccgcgcggtatccctgcgcaccggtcagcatccataagaggactccgaccgccgcggcgatcagcgcgaccggcagcgcgatcgcgcccatctttccggaatgtttcttctgcatgacaatactcctttcttcatccttgcaaagggtcttttcattttcatccaagttgattataatagatagataccgcatttgtaaagggggtcctccgcatggcgacgctcaacaccgatatccgctatatcaagggcgtgggcgaagcgcgcgccaagtcgctcgccaaactcggcatcaccgacctgcgctccctcctttcctactttccccgcgcctacgacgaccgccgcgcgtacaagaagatcgccgacctcatccccggcgagaatgcctgtgtctgcgccgtcatcgcgggcgagcccaagctctcgcgcattcgcaaggggctcgacctcgtcaagctccgcgccgtcgacgaaaccggcgcacttgagctcacctatttcaaccagtcctacctcaaaaacaccttccacaccggcgacgcctacgtcttcttcggccgcgccgagggtacgccgagccgcccgcagatgaccaatcccctctttgagcgcgagggcgcgcaccagatcaccggccgcatcatgcccatctacccgctcaccgcgggcgtcagccagtcgatgctctgcaaggccgtcgagcagggcctcgccgcctgcgtcgacgaacttcctgacatccttcctgaggacgtccgcctcgcctaccagctctgccacacccgctttgcctacgaaaacatccacttccccacagacgacgaagccctctccgccgcgcgccgccgccttgcgttcgaagagctgttcctgctcgcgctcggtctcaagctcctgcgcgagcgccgcacgttcgtcgcaggaaagcagtgcaaaaaggtcgaccttctcccctttttctcttctcttcctttctcgctcaccggcgcacagcgccgcgccatcggcgatatcgcccgtgatctgaccggcaagcgcccgatgaaccgcctcgtgcagggcgacgtcggctcgggcaaaacgatggtcgccgccgccgccatctacatggccgcgaaaaatggtcttcaatgcgccctcatggccccgacagaaatccttgccgagcagcactaccgctcgctcgccccgcttttggagccactcggcatcccctgcgcgctgctcaccgcctcgaccaaggccaaggagcgccgcgcgctgaacgaacgtctccggtccggcgagctctccctcgtcatcggcacgcatgccctgctctcgcctgacgtgcagtaccaaaacctcgggctcgtcgtcaccgacgagcagcaccgcttcggcgttgaccagcgcgccgcgctgtccgccaagggcgatgacccgcaccttctcgtcatgtccgccacgcccatcccgcgcacgctcgcgctgatgatctacggcgatctcgacgtctccattctaaatgagctcccccccggacgacagaagattgacaccttcgccgtcccgtcgagctatcatgcgcgcatctacgccttcttgcgcaagctcgtcgccgagggccgtcaggcctatatcgtctgccccatggtctcggaaaacgacgagctccccgatgagcgcaaggccgtcaccgcctacgcagaaatgctgcaaaaaaaggtcttccccgaccttcgcatcgcccccatccacggcaagatgaaacccaaggaaaaggacaccgtcatgcgtgctttcgccgcgcacgagatcgacgtgctcgtctccactaccgtcatcgaggtcggcgtcgacgtgccgaacgccgcgctcatgctgattgaaaacgccgagtgcttcggcctctcccaacttcaccagctgcgcggccgcgtcggccgcggccgacacaagtcctactgcgtccttgtctccgacaacaagggtgaggaaaacaagcagcgtctcaaggtcatgtcctccacaagcgacggcttcgccatcgcggaagaggacttgaagctccgcggcccgggcgactttttcggctcccgccagcacggcctgccgtcgctgcgcgtcgccgatctctcatgcgacttatccctcctgcacgagacgcagtccgccgccgagcagctcctcgccgctgaccccgcgctcaaaaatcatccgctgctcaaagcccgcgtcgagcttctcttcgagctcaacgccgatgccatgaattgaaataaaaaagtcaggcctgctggcttgacttttttacgctttgtagtacgattagtataactaatcatacttcaggaggttgattttatggaagtacctcagggcaagcacgcctggatggtcaagatcggcgaaaagggtcagtttgtcatccccaaggaagcgcgcgacattttcggctttcaccccggcgacgagctgctcgtcctcggcgacgacgagcgcggcatcgccatcctgcccaaggccatgcagcgggaatatatgctgcgcatcttttccgaaatggacaacggggacgacagcaaatgagcaagatcgtctttttctgcatcccggcctacggccacaccaacccgacgctcggcgtcgtgcgcgagctcaccgcgcgcggtcacgaggtccgctactactcctacgaacccatgcgcacgctcatcgaagccgcaggcgcgcaattcgtcgcctgcgacccgtatgactgcgaacagcacctcacgcccgccgacggcgcgcgcgtcggcaaggacattgccttttcaacgcacattctggtcgagaccaccctcgccctcgacgaaatggtctgcgccgacatgcgcgcttacgcgcccgactgcatcgttgccgactcgatggctgtctggggcaaggccgtcgccaaaaagctcggcatcccgttcatctcctcgaccacgacctttgccttcaaccgctattctgccaaggtcatgaagcagagcggcggccagatgctcaaaatgctgctcgccatgccgaagatcaaccacgatctccagcgcctgcgtgaccgcggctatcccatcaaaaacgtcctcgacatcatccagaacgacaaccggaccgacaccatcgtctacacctcgcccgaattccagccctgcgccgacacgttctcagacaagtacgccttcgtcggcccgtccatccgccccgcggcagaaaatatcgaaaaggcccacgatgtactcatctacatttcgatgggcacagtcaacaacgacctcctccccttctaccgcgcctgtatcgccgcattcgcggactctccctatcaggtcatcctctccaccggcgagcagatcgaccgttccgccctcggcacacttcccgacaacatcaccgccctcccccacgtcgaccagatcgccgtgctgcaaaaagccgacgtcttcctctcccactgcggcatgaacagcgcgagtgagagcctttatttcggcgtgccgctcgttctcttcccgcagacgaacgaacagggcggcgtcgccgcccgcgtcgccgaacttggcgcgggcctcaagctcgaaaaagccgacgccgcctccatccgcaccgcggtcgacgccgttctgcaaacaccgtcgtaccgcgcgaatgcgcagaatattcgtgagagcttcctccgctgcggcggcgcgaaagcagcggtggataaaattctttctgtcgctgacaggaaatagtttccccatgccgcatggggatgaactgcaccccatttgttagacagtatgatatactatctaagaagtggggtgttttgctatgccaaaaggagtaccaaacaaacgatatacgccggagttcaagagaatggttgtagaaaccatgaaaaaagaacatctgagtatctatgcagcgatgcaggaattcggaattaacgaccataaaattatagagcgttgggaacgcat

SEQ ID NO: 20 - DNA, 259246 bp, Colonithrix sana
  source 1..259246: mol_type = genomic DNA
  misc_feature 256450: note = n is a, c, g, or t
  misc_feature 258031: note = n is a, c, g, or t
  misc_feature 258523: note = n is a, c, g, or t
  misc_feature 258800: note = n is a, c, g, or t
acatgctccattcctgcttcttggcttcatgtttcagctcattgctcgtcatttacttcacaccctgaacattatagtggtggaaagtttcacaactccccgccactattgtcccatgtctgtccagccgctgcctgttttgacggttacgacgaaacggagcttcggtattggatcaacgaccatattgaataacgaaaaggttgcctcacgcaataatgtgaggcaacctttttgttaaagccgacctgatttgacgaaaaaaagccgggctgttttgtcggatagccggagtgttttggctgcatggccgagttgttttgtcattttatcggctgtttgatgtggcgagccacatttcgtcatttcataggctcactaaagaagagaaaccattatctcagcttatcgtttcgatttctccaagcaaatcattttttcctgagttgctaattttatctgcaaaattgacttatttatgaggactatcataatctgcacgcgctggaacacaagagcaactttttgaaataacgtacctttgaggagtctggactggctcctcttttttgttgcacaaattgtgcaggcggtgcttgcacaattatcaacctaacatctgcattccatacaatctcgatattgtcctcctgttgttctgcgttatgctttctccgtgcattttcgtattatttattctgccatctgacttcgcccttggacagaagcggataacagatcagctgatctgaatccagattttccgcatgcatgtcaaccgctgtgatctgatgattatcataagtcgtataataataaataccttttgctgtattacaacaggacgtgtatatcgtgatctcatatttgccttctgtcacctcacagcatccacgctgctgatctacggatcctaagatatggaagaactggcttacactctcatcctcttcttcaccggagatcgaatttaattttgtaaaggcaactttcacaaatcttgactggctggaaagatctccaggtattcccattccacccattcctctgctatatgcatcaagctgtaatactcctgcaaaagtactctccggctgttttctggatactccggcataattattcagtgcaaacatctgactcgggaatggtggattattggtaagcactcctaccggattatcatatacatgcagcccatctttcatagactcaacaacgatacaggagtctttgtctgcaatgatccagtgaagctgtgctgtcggcagctgttcactgaatgctgtgcctgtcagtctcattgctgccagcttctctctcgcctctgctacagtagcacactgtgtaaggatccatgggatgaactcgaactgtgccacctggctgacttctgtttcatcttccggcaaagcttcttcatatgccgcattgccgacaaaattaagacctgccattccaaggcctttttcattaacagcatcataataaagcggataacctcctgcaacaaatgccattccgatcaaagcataatggctttttatcttcccggcaaaccggaaatcaaattcgtaatttcttggcgttatcgtgatctgttccccataggaaaattcataatcaagcgttctgcccatataaaaatcttttgttttgtaagttgctgctgtacacatatcgaacacctcttctttctgctataatagtcctgcaaacaatctcataaacaactgtccgagccataaatatgcactccgtcctgtgcggtacttttcggtcacttccctgcattcattcgaggatttttctttacacaataactccatataattaccggaatcagacaaagccgaaaaaagaaagaagattaggaaccgtaataattctattcaaattttctttctgattcacttcactctgcatgtacggtcacctcactttccttttttttaggcataaaccaataaaatataacacaaaatgctaaagcaaacacaacaccaaaaacattttgactcactctaagactaaccgctccttgtagtccatatgtctctgcagcaatggctaaagcaccaaatgtgttaaatactgcctgccagccatattgtgctgaaaatcctacaccgattccaccaagaattcctatatatgcatagattgacgaaggaagcagaaaatataatactgtaaaacatataacacctgcaatatttccgacaatccttttacggactctgtagtgcatatcttccatagacggcaaaatcacggacatggccgcaataccagcccacattgcacgtggcatattacaaagttctgcaatgcaaaggacaatcggtacgcataaaatctgacatatctgccattttgttctggaagaagtgatatcaaattcttgtatcagatctttcagatttcttttataagttctgtttttatgatttcgataaaatacgaagcaggtaagtgctgcacctaaagccattccgactaatcgcatctgatagctttttcccgtaacatcataaccatatagcagcagatacccaagaaccaatgtagattgattaaacatggatggattatggcatccgaacagaatcaacacagccagtgccgcaatatttaacagcattcccaataccggtgaaaactgatttgctaaatgcggacatacagtcataattacaaagaacaaagccaaaagcatcgtagattgtccggtgtggatccccagatccgcattcctaaacaccatgagacataataagactactacacctacaatgctgttctcatttccaaataggatgctgaaaatactaacaaagaaaaaacaaaatgccattgtagcagctatcttcaccagatatacccacatatgatatagtttttcttttagtgtttcactctttctcaacaggtttttagaacctgcctgatttaactgcaactcctgataaaatgtcatataaatactcccatcttctaatttatcttaaaactagataatctcatctttctgctttggcagctctataacaaatctgcatccaccatattcacggttttctgctttgattgttcctccggcactatctacaatccgttttacaagtgcaagacctaggccatttccttctgctttatgagatccatctacctgatagaacttgtcaaatattctggattttacatcatcctctattcctggtccttcatcttccagaatgaacttaacagaatcctgttcttgtttcagaaacatcgtaattgtcccctttgaagggctgaacttaatcgcattatctaaaagatttatccagatatgcataaaaagtccttcattcgcagtatatttaacttcctccaattctacctgaaaaccaatttctttttctgtccattttgtttccaatgaaagaactgcctggcggatctgttcatccagacgattatcgtcaataaacgcacaaactattcgaacgcctgctacatcattgagatatgtctgtattctcgtctgagttgctttgtacattggacagctccggtttgcgggtatgcagccgccgttcgattgattcgtgtagaagctgagatacaagagccattaacggaataaagaagatcatgccaaggacaccgaacagtttaccgcccagcaaaaccgccaacaacgtccagaacggggatagccctacactgtttcccacgacgcgcggatagatgaactgattttcaacaaactgagttgcctgatagacgatcaagcataggagcgccttgttcggagccgccaataaagtaaataaaatgccgaaagcgcaggagagaaatcctccaatataaggaacgaatgcaaaggcggcagttaaaacggctgttagccccgcatatggaatccctgcaacagaaaacgaaagaaagatcaatgttccaagaatcataacctcgacacactgaccagaaagaaacttcgcataggtgtcatgtgcaagtttcgaaatatggcaaattctatctgcaacggattccttacagtaggcatacagtgcccgtttgctttgactgctcaattcacgccatccaattagcacatagaatgtgatcacaagtgaaattgcaacatcagcaatcgcagataccgtagagccagcaacattggcaactgaggaaatcactgtgttcatttcgctcgaaatgctttgcagaatagatttccaatcgagcgcagcaaaatgtgccgacagtttctctgtgtcaatgccgtatctttgcaataagccgacccagtcaggccatttttcttgaacaagagcagcaatgctttttacagatgcagtgagctgtggaatcgcaattacacacagaagagcaataatcgcaataacacatatcagcgtcagtaacaggcttatcatgtctatttgccgatctgtagctttagtcagctttcgtcgaagcctctttgccagtccgcgcacgggtacactcagaacaaaggccagcaaaaggcctgataaaatcggagcgagcaagccaatacacgattttagaaagttggcaacatagtttagattgttgaatgccgcaaataagatcaccccaaacgtgattagtagaagcggctttttgtaggatttatccatgattacatcctcgtaagaaatcggtttgttttattattggggagtatcttataggcaatccaccaaccaaagaaacagactggcaatgcagcgagaacatccatgatagaatgctgtttcataaaaacggtggagagactgatacacacggcgattgatgtagcagcgattttccatccgacgctttggagcgccttgcaatcccataacccaaacatcgcggcaacagagcctattacatgaagtgaggggcaaacatttgtattggtatcgaaactatagaataattcaataaagcgtgtaagtagattattgcgtacaaatgcttctggccgcaaattttggcaggttggaaagaacaggtaaatcaaaaccgtgatcgtataggtgactatcacaaaatacatcatacgccgaaatgcaggtacatcgacgaaaaaagtataaaccaacgtaccgattagaaagacaaaccaaaatagatacggaatcaacgcccattcacaaaatggtattatatcatcgagtccacaatagacgggatagtaatttcgttgcggttgcaaccgctcaagaaacaaaaacagcaagccgaaaattggccagtaaagcaatagcctgacgtgagaaaattcaggtgtattaagtttatggatgcggaactcacggtaattaacttccggctttatatgattactttgcatgactgtatatccattcatagattttatcggctgccgtacattccgtctgcgaccgcattgccgcgcgcattttagaaagaagcactggggcatttagcgtttttattgtggtgtctgcgattgcttttggcgtattggctgtgacggccattccattacgcagaaaaaaattcagattatgtgtctcgcagccagccactgcatcgataagcaccattggtaactctgccgccattgcctcagatgtacttagacctccgggctttgtcaggaataggtctgaggcttgcatgagctgcggcacattattggcggttcccagaacatgaacttgagaatacttttctgtccttttttggagttttttgcgtaaatcatcatttgtgccgcatacaacactaagttcttgttctgttgtgaggtaagggcagagatacgatataatctcctccattggaccgcagcccatgctaccgcacatcattaaaatatgctgatgagcaggagagattccggcgttggcttttcctgcttcttgtgacacacgctggtagaattgctgccgcacagggattccactggcgatcagcttttgaggttgaagtccacattgttcaaactcacctaacagcgaagtggacggaatgaaataccagtccagcgcagaatccgctgtgcagggagcgcaggtatagtctgtagaaatgtggctcgttacaagctgtaagcatgggtgctgtcggcgcatttctgtcaacgccaaggctgggaatacatgagtacagataatattatcgtagcctgcagagcggatgtattgatacatccgctctgcgccggaggaaagtagcttatagatcggcgttccctcacaaaaaatatcttcgtgagattccgcacgctgatacccagcatcaaaaagccttggagcatggcggtaaattcgggtatgccaattagaaataaacgtggatgctttttctgaaataaactgcaaagaatctgtaatattgcagatttctccgcgagagtggtaggcttcctgaactgcttgcgcacaggagttatgccctgcgccagtgttgcagcttagaattagtgtttgcatttgaatctcctattttttcctttgctgcatagcaaacagcttttgcaggcgtgggcgattatagcgctggacaacaataaacggcaaattacccagcacaatgtagataatcgttatacataccccgccaacaccggaccatattttcagcagtccaagaccggcgatagacaacagaatatgtgtccactctgccacgcaagtttcttctatcatgcgcggcaagttctcatagttttcctttgtcagtttcttttccggcatgattttaacgaatatgcggctcatatcggggatctttgcctgccatttccgaacatgaagccgcttccatagtttttgctctgccgggtggcagacccaaggaaaacgatcggcgtgaaaccaatgcttcgggatcaagcgccccactacaaaggagagaacccctaacgccgcgatatatagcagacacataagaaaatgcttcataaaaacctcaacatagcggtgcgaaaatacgaaggacaccatctacgacccagcggcgcgaataatgtttcatatcatagggctttacctctttacattttgcctgtgtagcgatgaaatcgtcctttattgctgcaataatactggaacgataaaagaacgaattgttttcaaagtggagaaagagactgcggtagtccagattgacagttcctatcgtcgcaactttgtcgtctgatacaaagctctttgcatgaacgaagccgggagtatactcataaatcttgatgccgccagtcagcaacacctgataaaagctccgagacatacggaaaatcagcttcttatcagggatgccgggcataatgatccgcacgtctacaccacgttgagcagcggaaatcattgcatccatcaagtcatcgccaagcataagatacggtgtaaaaaaccatgcgtaatccgtgctttgagaaagcaagtcaataaagagctgattactggtagcttcatggttaaggggcgaatcgtagtaactaagcacataaccatcaaatgtgtgcggcggcgcaggataccttttgggatatgtgggcattgcaagctgtcctgcttctttttccagcgaaaatgcgttccaaaaggtcaagaacatatgggtaaaattttttactggctcaccagtaatccgaaagcctgtgtccttccagtgtccatagggatgttccaaattgatataccgatctgataagttgatacctccgctataagcaacttcgttgtcaataatcagcattttgcgatgatcgcgatagtttgcagttccttttaaggcaaggaaaggattaaaaggaatacatggaatgcctttctttttcagttcacggacattactgaaattgaacgaagaaatactgccaagatcatcgtatatcacacgtacatcaacgccctgctccatttttacttccagttcgttcacgattgcgtcccacatatgccccggctcaataatgaagtattctacgtaaatcgagtttcttgcatttttcaaatcggcaagcatatcagggaacatattatcgcccaacggatagtaacgaacctgctcaactgcacacatcggatattgcgttttttcttccagccaccgcactgtttgccccatgcgtttttcgccgtcaaagggcgcttcttttattggaagaggctgcggattgcaactcttttgaacttgctgcaagcgcctttttagagggcgggccgtccgtttatttccaaagagcagatatagtaacgctcctaccaaaggtagtgacagaataaccagcagccaaagcaatttataagcggtttcatctctctttataataataaataccaccaagaaaaacgctgcaacggaaagcagtgacacaataatcggtgcgtaaggggtcagccatttcatcaacagcaaaagccagagcgattgtaaagccaccgctggaataattgttagaatgcgtcgaatgatttttcccatatgtttacccccctctatgttatttctcctccgaagatgcttcccaatcgcaaactatttgtgccatttcctgtggggtttctttatagcctcgtaatacccacgcattcataagcccaaacaatccatatgtaataaattggataaagtagtgcgttttggcatcggcattagcgacaatggatgccgcttcttgtaaatagaagtttagaatcacatattggcgatcagctgagtagagcagatcacaaataggacgagtggaaaggcaaaattcaaaaaacagcctgatgccgtcataactaccagtggcgaagttggtagcaccgtgttcgtcggaaaagcgcttccacagacatgtgattttgaaagacagaacttcatctttacttttgaaataacggaaataagtggagcgacctacatctgccttggcagtcatctcctcaatactgattttttcaatgggtttttctttcattagttccagcaacgctgtacccatacattctttcagatagtctgttgtagccgttgtccttcgcataagaaacgtctcctttaattgcgtatcattgaaacaaggattgtcatttgttccactttcgctcggactattgacaacgcctgcttctgtgatattcatagcatctatgatactatcgtttcatttatactatcatttgctatttgccctgtcaagctaaaatgcgagtacgacgagcagaaaggaaaactatgggtacgattttttcccgtgtaaaactcagcggaaagcatgtggccgccctcttggcgctgatgctgctctccgctgtgacagccatgctgctgcctactgccctggccagtatgattgacatcggagtggccggagaaaaccgaaacaccatcctaatcattgcggcggtgatggaaaccctggccattctgcggctctgtgtttattatatttgagctattcacagtaaagttggacatttgtattcagcgggagaaaataaccttgacaaatctcgtctcagaagtccatgcttttgcagtatgccagggagcatcacttccccaacccaacctttttcgtggatgacggtgtaagcggtgtgacctatgaccgtcccggctttcaggccatgctggccgaaatcgaggcgggacgggtggccgtggcgatcgccaaagacctttccagactgggccgcaactccgcgctgaccgggctttacaccaacttcacctttccgcagaacggtgttcgtttcatcgccatcaacgacaactacgacaccattgaccctaaccgtgtggacaacgattttgcgggcatcaaaaactggttcaacgagttctatgcccgggacaccagccgcaagatcagagccgtccagaaagccaagggtgagcgaggcgtacccctgaccaccaatgtgccctatggctatgtaaaagacctggagaacccccgccgctgggtggttgacccggtagccgctgatgtggtgaaacgcatcttcgacctgtgtatgaagggccgtggtcccatgcagatcgccaaccaactgaaagcggacaaggtgctaacgcccagcgcatacagggccttgcagggcatcaagaccccaaacaagaaaccggaggacccctgcgactggcacagcagtaccgttgtggcgattctggaacggcgggagtacacgggctgtacggtgaacttcaagacctataccaactccatctgggacaagaagcagcgggacaatccccttgagaagcaagccatcttccccaatacacatgaggccatcatcgaggaagccgtgtttgagaaggtacagcaggtgcgccagcagcggcatcgcaatacccgtacaggccgaagcagcatcttttccgggctggtgtactgtgccgactgcggtgagaagctgtattaaggggcgacgaacaattaccgaccggagggcgcgttctttgactgttctctccattagaagcacaaggacaagtgcggtactcattacatccgggaaaccgtactcagccacatagtcctgaaacacattcaggctgtgacgggctacattctgcggcatgaggcacatctccgtgcagtgatggaggaacaactccggctggaaagcagtgagcagatccgcatccgaaggaaacggctggaacggaacgaaaaccgcatcgctgaactgaaacggctgttcatccggatttacgaggacaacgcctgcggacggctgagtgatgagcgcttcgatatgctgagcctgacctatgaaacggagcagaagcagttggagaccgagtgcgtaactttgcgacaggaaattgaagtacaggaacgacagaacgaaaacgttgagaagttcattcagacggcgcacaagtatgtgggcatcgataagctggacggctacgctctgcgggaactggtgtccgccatctatgtggacgcaccggacaaatccagcgggaagcgtgtgcagcacattcacatccagtacgatgggctgggcttcatcccgctgaatgagctgatgaaagaggaaacggcgtgaccgaagtcacgccgcaccctttgaaaactcaaggttttcaccattttttcattttactgttttacgaccacccggccaatgatgtgaccattatgaaagaggggcacccagaagcgggtacccctctattttggtgggtcaggttggaattgaaccaacgatgtttcagatgtcacggttttacagaccgctgcgatcgccaactacgcgcactgacccatatggcggagagcgcagaactcgaatctgatatcacttctgatacgatccgcttagcgggcggtccccgggccttccgggttcactctccaaatatggctggggtggctggacttgaaccaacaaatgccggtgtcagagaccggtgccttgaccatttggcgacaccccagtatattggcagggatagggcgactcgaacacccacgggcggttttggggaccgctgttcttccggttaaactatacccctgtatgatgatggtgatgcctgcgggatttgaacccagcattacaagcttgagaggcttgcgtcctaaccaattagacgaaggcaccagatggagatacgggtcggattcgaaccgacgattaacagctttgcaggctgtcctcttcaacctcttgagtaccgtatcatggctgggatagttggattcaaaccaacagtggccggcatcaaaggccggtgccttagccgcttagcaatatcccagtattatggagatccgcgccggactcgaaccggtcattgcagccgtgaaagggctgtgtcctaaccatttagacgagcggaccgtatggcagggagaagttctccctgcatattaagcaaccgagtgatcggtaatgaggatatcatcaatacgcacatgcagcagtgcagcaagggcgataagattatctacagtcggcagcgcagtgccgttttgccacttgtaaatggcctgcggggaattgaagccgaatgccatttgtaggtcatgcaccgtcagccccgctgctttgcgaagcatcacaatattggtgcctgtgcgagcaaggttgatcgttggaatgttcattctcaaatacacctcctatctgaattatttggcctcatgggcatgaaaaagccgcttgtctgcactcaagacaagcggcttcaataattcagagaaggagatcctgatagaccgattctttcaggtcaacaggtactcaatccgatcatattcttctgcttatcttgatatgggcgtgcttcgcaaaagctatattcctcgcactggaagatagcctgccattcgctcatatagaagatagcggaagaaatagtcttcatagttctgcgtcctttctgtagagatttgttcttggtttctgactgtactataccacaactctttcggtttgtcattcaacttgtggttaaatatcgctgttttctggagagatgacaccattctcaacatagtatcggtagctgccgtcgatattgaccttgccccagtgcttaatatcatcattctcttcaagctcatctggatggatacaaaagtcgtcgatctggtcgccataatcctcgtcggcatatacctgacaatagtatccgccttcattaggctcacaatctggcgttgcagaaacataaaggcccctgtactccatggtcatcgactccttgtacaaaaaatgcggtcccaatatgtcagaatgcacaaaccgtttcaagtgcagttttcacccattacaccaggctacagcctctttgaattgctcccatgtaatagctgtaccgtattcatcatagatgctgaactcgggattgtcgcggagccactgctctacggagaaaatgtctcgaaacccgttctcgactctccaggaaaaatgaccggctcttgctgtgccgatcacgacggacgcactttccggttcctcaatctgaaagaggaactgatttgagattttattaagcagttcatccatggtgtcctccaggtcagaagtgacggggatttctttgatccggttgatgcaatccgcctggattgcgattagcttttcctgaagagcagccacttcttcaacgacctgtcgtttcataaattcatattgcgtactcattgtgtttcctcccatgagtcatgactgccgtgcactgccttcaaggcatctctatgcgcaacctcttcaacaagatagtcagcctgtgcgaccatggatttttgttgttaagctttacatccagaaccgtccggacagacacccgaacacgatggaaaccacgccctggatcatcaggaacagccccgccagaacggacagcgtcaccgccgcagccaaggggtccataaaggagaggaatccagccgccgccattagcaggccgaaggctgtcacccagccccatccccgcactccaaaccggcgcagatcaaaggagtttacaaatttcgtgatgccggagaacaacagccacatacccagaatatagggcagggtcatcatggtgaacatctggttgcacagcaggaagatggacagcagcaccgtaaggatgccatccaccaaaaaccatccggaaccgtaaatactgctgcccgccgtggcaaaaatcataatatctaccgcaccggaaaataacatggccattcctaacaggaaggacagcccgctcagggcagcgccgggatggagcatacatgcaccacccgccacgatcagcagcacacctgccacgatccacagcacgcgggaaacggttttattcatacatcatgcctcctaaggaaaaagagggggatccaactttcctcccgtcgatccattcgatcttgtttcgtatccccgcccggaacccggacggaaatacgacgcaggaccgccgttaaaagaaaccggccgggacccgtccttgcgggccccggccatttggtcactcaatggcgatagcggtctgagcaggcacctgcttgacctcggccttggggacgaacagcttcagaacgccgttctcatacttggccttcacatcctgaggctccacatcctcgcccacatagaagctgcggctgagagaaccggcgtaacgctcctggcggatataacggcccttcttatcctcctcgtccttgtccagtcccttggcggcgctgacggtcaggcagccgtcctgcagctggatctctacctcgtccttcttaaaaccgggcaggttcatgtcaatctcgtaaccgttctcgacctcccgcacatcggtgttcatcaggttcttcgcatgcttgccgtacagctcatgttcggcattcgggaacattgcgctattaaagaaatcatcaaacaggttctcactaaaaatactgggtaacataaattgttcctccattcaattcccgctctcggttccgggagaagctcccggtccggagcttgagtatttataatttgatttgatctcttgggggggatctctttatccctctccctaagatcgtgttcattataaccccgtttttagcaatgtcaatatacgagtgccaacgtttacaaaatcagcgatctttgttcacactttcctgctatttttgagtattcgttttgttatattcgatttttctttggtttcgatttaaattatcgtcattttgtttataaattaaaaactcgcatctcgacttctttacatagagggcgccggcctcagtcaaatcaacagagacttccttgccggcttcttcccaggatacggtgtaaccggcatccggcgcttcgtataaccaccagccgatattgtcatactggtcttgcatagtgtacttcagcaaatcgcgcagtgcgagcaggtagagattgtccttgtcgaaggcaggaaaaccatcgcacattttactgagggccttatcgaactcatcaatacgagcctcctgctggcgtatcttctcaatcgtgctcaaaaacagtgcttttggcagcacaggcagcactcctttcttattcatgcgcggataggatttctttcagcgttctcggctcgtagcccatgtaaggcatcatgcagccgacattgatggcgcgaatgggctttccttgttgaacattcagtttcttgttctcgttgagctctttgacgcatttctggaagaatgcctcttccacagtattatgagtatgggcgtagagaagaatcgatccgcgatgctggccgttccacatcaggatgggatagtgcatcaagcagagcttgtatgtctttccatcaaaggaatcggcaatctcccggtagtcagtgatttcctcaaagagccgctgatagcgatagtcggacaggtcatcgtggttaccgcgaaacaaaatcttcttgcccttcaactgggcaaccagcgcgagtagtgcactgttcttaccccgcatggccatatcgcccaggatatagacggtatcaccgttgttgatcttggcgttccagcgttcgaggatgtactggttcatctcttctaccgtagcgaacgggcgtctgtcgtagtttctgccttcatctgtctggttgcggttgaataggtgcaaatctccaatgtaataattcatccgatccctccttaggtgatacggtagatcacacggatttgagaggcagcccgatcaccataggactgacccgcccggtaagggagcgcatcattgaagcactcaacctgatacttcaggcgctccaccatagcccggatgttctctgtgtttgcaaaggtgtcgttccagcgatagagcacatactcgtttcgggtagcctgaggcaattcgagcaactcgtgagcggtcaggtattcgtaaatttcgtcaatcttgtgttcttcataagctgcaatctggttgcgggtgacatagtattccatctggtacgggccattgagcagccgttcaaaatcatcgagattcccggctacatagaagcgctccagtcgaagactatcctctcggccttcaaaagtacttgcaagtaaaagctgctgcgtgctctcagccaagtcatcaaagccaatggcccatgctccgttcacctgatcctccagcaagccaataaagctgcgtgaaatggtggcgaggtactgatgacgcaatttgccgtcaatatccttggtatggaagtcgatgttgtaccacttgccctcgtacttggcctcgaccatgaaatcataataggtgctcatgagatatcatctccattcttttggtttggtgcatcatccagaagtcccagcgcttccacaatctccgcctgacgatgcatgcggcgaagcatgtccttttctgccgcaacggaggcttcgcgagggatcatagtgtagtcattatgcatgatccgaatcttgtccacttctttctcggtgtggtagtgggcgaaataccatcgctcataatcgagtttcgcctcgatctgctccagccatacttcggtagacttgtccacggtgctctgatcgatcatgggcagaaagacctcggtcggctcatacttcaacgggccggtatgagacaacacgatatcaatcttccagctgcgctcggcgaggacgcgctccaccttggctttgatttcttcggaaggctgttcatctgggaaccagctccaaccacgggccagacgatagtatttatccacgctgtaggcgccgccgatgacaatgcaggaattgccattgaagtcatagacctcgccgtcaatggcgaacaggatattaggataagccggctgcatccataccttgccaccgtgatattcagcgacctcataaccgagctcttcggacgggcgcatctcgtgattgccgtgtaggcagaagaaggtgatgggtacctgggcaagttggtctttcttctttcggtccctgcggtcattgtagtagttcagccctgcgtcgcccaagatcacaaaggtgttttccggttcaacctctctgcgtgcgcagaactcgatcacgcgctcaaattgcccatgggtgtcgccagttatatatacttggttgcgaggggccaggatttccagcagatgggctcgcacctcttcctcagaatagtatgggccctcttgtgcttcttcgagcatggccatcaactcttttgctgcttcttctctgtccatttttattcactccttttcgttggcaggagtttggatactcccaataccacttacggatgacaggattgcttaacaacagaatcaaacgaaattggcgcgacgatggagctacccattgccgcgcctttcttacttaacccattgccagctcctggctctggttgtccttggcaacaatctcttcaatcaacttgctgtcatggcgcatgatgtaatcaaaggtgtctttgagggagaggaagagacggggctgtgtatggaacttctttgtgttcccgcgctcggtgacgagattgatatgctccagccgaacgggccgcaaactcatgtcgatacgccacttgccggccatggtctgcagcgtgaaataccgcatgtcatattcgaagggcagacagtgctgcgtacagagctgaatcagggtgtccgtagtctcgccgtgtcgctccttattggtgataggaattgagaattttacatcctgcttgggactgggtctgcaatggcggcaaggagaatagccggctcgcacagcgtcctgataccgcgcaaaacccctgagctggttgagcccggtaatcttagagcagtttcttgtgtggaaggtgctataccccttgcttgcccagaaagcaagaccgggttgcgaaagggccatgacggtattgcgctcagcctccgtcaaatcgccgcgcttgaaagctgtttcgcgttcttctttagctcgcttgaaccgaccaagtgcctttcgttcttcgccgttcagattgcggttttccgctttctgcggcttgttttgctttatcggcaaagaaatacgcttgcgctctatcggcacgggcttacaatgtttacagggccggcgtccgctcttcaagcaggtctcataggatacggtaccctgaatgtcaaaggatagcagcacatgggagcagtttcgtgtatgaaacaccttggactgcttggaatacacataattgtaatcagatcgggtgatagagtcctggttacgatcccaaagcgcatccagaaattcatcatggcagcaggcgcagggtttatacctcttccggatcggtgccttaaacgaagtgtatgccggcaggtaacggttatccggaagcagctcgcaatcagagtggtgcagcagctgggttgaggtatcgtagagaagcggaaacaccggtgatcctttcagagcagtggtgtcctttacccacttcttgggtggcgcctgcagatttctttgctggaaatcgatgctttgaacgagagactgtatcgccaaaacatcattgatggaacagtgtgcaggttctggcgtcgggatatctcttgccgcacaaatcttgtagggacttcctacggcacctttctgaccggccaggaacccgtagatgtagtcggagaggaatactaccatagagacccgatcacggatctgtgctaccttggtgaacatgatatagaggtcataggcctcctggtgccaccagcagagaatgtcctcgggctgtagccagtgctcaaaggcgtcaagtgccggatagagcgaatctgcattcagaaagttgtcacgagtccaaccggagaaggccatgtgatcccacttctggaaggtgatatccttgggccgaaagagtacagagaaggaatccaccgtctgccattcttcatctacacggattgccgcaagctgtgttggccagtgatttccgtgtcgatttgtaacccactccatatcgatcagaacatacatctctgtcacctctcctttgtgagacctatcggattatggccatagcatacaatagagggtgtccaaaagaacggacagcacatatgtgtaccctgcgggaaggtagtaattacagtacaacgccgtggttttttcaaaaactatgttgcactttctctgttttggtgtctcatatatgggggatcaaaatgaacatattgcaaaagctgtttcaaggaaaatgcattcctgtttcagagcatggcgggaactcatcttgtgaatatgaggtagccgtggaaaaactttgtaagattgcagaaaacctgcgacaatatggcgtgccggaagagctgatttctgcgcttgataaagcggagaacgagatccttgcattggaagaggaacggatgttccgttttacgattcgatatcgagcagaattacagcgagagcttatgtgaaaggggcaggccattgcggcctgcccctttcgctattatgcggttttcttcttccgttcctgctcccgttcaacctgttcataggagccgatgtacccaagtctgtattccagaagaagcgtgtggtcgatcatactcatgctctcaagccctccgactgcgtcaataaccctcagcgccgcacgatagccacaatagaaagcgtggcaggcaaaggagtgaatgcgttggccccaagcgcattccaacgagacaacatgctccttgttttcatccgacagctcctcgctcagctccttccccaggcggagaatctcgtcgttgcgggcgtagtagtctacatggcgctgcataccgggcatctccataaggcttttcatgaggtagcgatcgaagccatcctctgttatcccattcccactgaagaacaactggaagccagagaacaggcccgcttcaaacccatagtgggaggcgtatttgcgattctgccgatagcgctcttccatcgtcttcaacttctccatttgctcggaactgagcactttgggcaactccaatcttgccgcatcatactcgccctcttccgttgcgaatgactctactgcccatgcatcgtactcctcgcagatatatgcgtcgtaggtggagtcgagggcacgccttttcatgttttccagcatacttgctacgctcatttttactatctcctttgtactatattgatactaatcgtaccagataagtacataataaggggaagtaagcgcaaaacttgtcgaatcatggggagtgcgcaaaaaaagatatgcacctaccgaaaaccggcaggtgcatggcttagcagattcgctttatgacaggtatcgcattgagtgcgatctccacacaagcgtcctcttgggcttttgtcaggcccatattctcaagttcccggcgtactctgcgctcgaggggaagttcagttttaccggcgaggtaatccagggacacatcgagtatatccgaaatgttgtctaacagagcgtaactgggtcgtctggtaccattttcgatatggcgcagagactccgtggcaatgccaagctgctcagagagttgttccgcagtcagtttcctgaattgcctcgcagtccgtattcggttgcccattacatgtaaattggtgctcattgaacatctcctacctatcattatctttctttaagtataggagattaacggcgactcaaaaatgagcagaacagtacggataataccaaattagtacgattgcaggaattatcgctgacaagaaaaaggacgccttctagcagtataagcagagggcatcctcatgttgattggttattagatgtagaattctttcagatcgtccagtcgaaggcaggcgaggcgccgcagttctgtcttattcccgcacccacaatcgatatcgatcagcccatttccatgccagatggcgaaggggctttccatatcgccactcatgtagcaggtgggcgtatggccgacgattgcgatgcgatcctcgaagtacggaggatcatccggtttaggcctcctccaaatccgatcatccgggtcatctgacggcatggcatgaaccaaatggaatttgcggtcgccaacctcaacatcgaaatgatccggcagcgtactcaggaaatgtatgatcctgtttcgctcagtgggcgaacatacatagagcagatctcgatatgtactgattccaccattctcttgccatagccgtctgcttccatacacactgttgggaccaagggtatccagacacatttgctcgtggttgcctagcagcatgaacatgttcggtgtgtccttgatgattttgaggatctccacgcctcctggatggcgatctatcacatcgcctatgatgtatagcgtatcgtctgaagagaaattgatcaggtcgagcatcgccttgaagcgatccaactcgccatggatgtcggacatacaatatatcacttgcgatgcctccttctgaaaaagtcaagacttgatttgttttgaaatccctctataatcgcctgtaaagaacacgtaagaggagtagagaagatgaaccaatccgtattacccggtttcgagttcctgctgatggtgacaaaggaaattatgcaggagtatccgaaagcgcagactgttggcgaactggatgaaatgctcctgaaggtctgtcatgaggcaaataacgagtcgatatcggatgctgaattccgtggcatgatctacgacctgatgctcaggaaagtagagctcatggaggaccggatgccaaaggtccagcttacctaaagatatcgcactcgctgtccaatagaacggatataccctacaataccatttttcctcttcactatcaagaggttgaaggcccccgacatcgttatggatgccgggggcttcttgttagctcacttgcacatactgagtttcgatgacttcactgggaggcacggaagcaaagggctgtcgggaccatgcgggggccataacaggaagcagagcgccggactcggccagttcataggcacgcagcatatcttccgcagacaggttcggggtccgggtacgaggcggtgcaatcttggtcagatcaaagatgatcgcgccctgctcaggccagggcacgccatagaaccggcgcggcgtcttcgcggtttcccagcccagcttgctccggatgatgtgggtgagcatccggttactcacagtcgtccactttttttgacctttcagatcatcggcagtgcgaccggccataaagggcacggcgcacttgtccttcggatcacaggcctgaatggccagcgtgcagccatccgagctgatcagcagacgaatatgctccggatagcccaactcagcggcactcagattattgaaccggatgctcgagtgggcgatgcgcacctcagcggcgctgaaggtgcgaagggtcgggttgacaatgcggaattcagacatgcaggcattcatacatcaatgtcctccttgaatagtatcggatgtagtgaggagagaattccctctccagtaatttcttcgagaataacagcttcgcgatcgggcatagagatccggttctttgcctcacgccactcctccttggagatcagaggcgggtgaacatcacgcatccggtaccgttccacctggcccagattgcgaacgcgcttgtgagcgaacaggtctacacataggctcttttgcataatcacatctccacagtatcggtcgttaccgagaatgtaggtgacggaagagagagtccagcacggcttctttcctgtgggagtggggacaccttcgtccgtcagtatctttgcgatctcatatggggttttacccccgagatagaaggcgaagatccgaataactacactggcctcctcctcatccacgacaagcttgccatcatcattctgatatccgtagggcttaaccagtttggggatgcccttagcaaatcgctgtcggataccccaggcaacgctgatggacttgttgacgctctcgtcctgtgcaaatgcggccaaaacggttaggagcagttcgccattttgggatagcgtgttgatgttctctgtttcaaagtagatgccaacgggtggcgatagggctctcaggtcacgggcgtacttgatgcagtccacgacattacgggcaaaacgactgacagactttgtgacgatgaggtcgatcttgccggccttacagtcctcaatcatgttgttgaagtccttgcggttcttcaccgaagttgctgagatgccttcatcggcatagatgcgaaccagcgtccaattcgggtgcttggcaatgtactcgttgtagtactgttgctggatttcaaaactctccgcctgcatttcggacatcgtactgactcggcagtacggagcaacccgatagataacatcgtcggaatgctgaggagccatgtcctctcgggcaggcattcgctctacctgtttcccatcatggaacgcctcgcggatcctttgcttgcgattctcgtttttactttcctgggccaaaatcgttttctccttccttatggtatctggaatagaagaaggcgtgaggcgggggcagctggatctttccctgaggggtatagactctgatcccatgccggttcagcttctggccaatcaaggtgcagccctcagtgctccttgataatctggatggatcaacaatcagcacacaatcataggcgccgtgttttccatctcggatcagcgttttgatgctctgccgctgcgggtcagtgccactttcaaaaacagtcacttctgccacgacggtaaggccgagatcctcagcagcctttcgcagcatctcaagttggctgttcatggctatttggttgggttcatttgcggtgccgccaatgcggcaatatatgcaacaacgactcattcgctttcgtcctccaattcatatttccgtacaagacggtagaatgtagatgcgctgatcccgagctgtttatagcactggacagcggtgatttggccctgcttccactgggggtagtaggtatcccagccttcgacggtgcatcgtggccggccaaacttgacgcctttcaggtgtgcagcggcaatgccctctgcctgtgccttagacttggtatcgacctcgagctgtgctccgaaagagagcacagcgaggacgatatcagtgatgacgctgccaagcaggtccttatactgggtggtgtcgaggatgggggtgtccagaacaacgatatcaacaccaagagtctttgtgaggaactcccattccgcgcggatggcagagtagttgcgaccgaagcggtcgatgcttttgacaactaacacatctccttttcgcaagatggtgttgcgcagggccaaatagttggttctctcaaagctgcggccactctgcttgtccacatagatatcacgctcttcgatcccagaccccaggagttccagaacctgtcggtcctcattctgatccgtggtggacacgcgagcgtaaccaaagcgtttgttactcatatgctcaccccttggtccggaacattcccataacgccaccgagctcggcgaggtcatctgcagcaaggcttgatccatttgtctccagagccggagtttgcgccgagatctgcaactcgccgctggagatcatttcggtaatgatctccttcacggtgcctgcaatccactccttgctatgctcatcagcaacctcaggacagctggtgtagtgtagtatggcgcttacaaccagttcagacatactgcgtggtcgctggcgaaggatttccagagcacgccggtgccggaagtccatctcattgaactgaaggaccacacgggcctttttattgctgcccatttgccgccacctcactctgatagaggagctcatagccgcgagcattggcatgaatatcctcgacgaaaatggggaaagctactttgttacctcgttcgatcattccacgcaggagcaaggaaccaccaccagcaaagacgcatttactggtggagacatcaacgcctcgctcacgcaggaagttgtagaactccgtaaggaagtcactggtcatggtacggatcaactgctgtacctcgccgggaaggacggtgggttggtttcggatgacctcgtcgatatcgcagtcttccaggatccgggcatagagcgcattacacttgcttgcgataccgttgtagagggtaatgacacccttctcgaagctctctaccaccgccagatccggatggccgctgcgcagcttcaggacatcgatggtaaagccgccaatgtcaatgatataggcgacggaatgagccttcagcgtgccgaactgggtaacggcagccgcaaatgcctggggatagctgagtaccttgctgacccggatcgagtagtactttccgttatactcaaaatccacgatctcgcgtcggcgcaggaagtactgctcgaaacggctgtgcagctgctcatagtgtgcgggaggcagacccacaagcagggtgatgtcaatgggatcgagggtctcgggcaccttgcggcgctccagctccttggcgatggcaaagagggtgaggacatagaaacgctcatcctccgtcttatcgcggagataggcgatgcgctgctctgtcagcgtatagtacttgttgttccagcagatgtagtccgttttgaagccctggaacccctcggatacaatcaggccggaagtgaacagcgcgttgggagtcttaatcgacttattgccgtgatcgacagaaataatcatggaaatttacctccttatccggtgaaacaaagcgagacgggaagccccgcttgatgcgtctgttagtatttacgcatagtgttttcttagaacaacaactacgcaaaatgtttttctgcgtgtagtttagtggtcttgcagaagtccccggagcttcttgagggctccgttgaccgacttcaatgcagcgttcatatggcagccttcctgccttgcaatctcacggattgacatgtcatccatgagcatacggatgcggcgctgctggatgggcgtcaactgagaaatcgccgcatagagctctacgacctgctcgtcccagatcagagcgtcctcaagttcgttaagcgtaaagtgctgcggcatttcctccagatcgtccatcggggtccagtcgcggtgatatacttcctttcgatgaatacgctgagtttcgttctgcagcgcacgccattcttcgtacagctcatcgctgacgggaatttcctgataaatgccatagtagtccttgattttgattgtcttcatgtgttacctccaagtcgtttcattagcggatgcggacgaacgacttgaaggtggcgcacgggcccagtagctggctcttgacatggattacgctcccaatcagggcaacaaaaaagccggccactctcgttttcgagaatggtcggctctttgttccggtattggctggcgcacaagggtatgaaaaaagcccctcggatcatagacccgagaggctataggtgctccagcataatccattataccggctgagtctctacactacaatttcgtttggctctcaatttcctcccaattttctatcatgttttctctcatctgactgccacattgtctctcatttgtctctcacgagacttccacctgagcggtgacgctaccgctttgctgcaggtgctccctgatgatcagatcagggattacgacacaccagaggcttgccgcataggcacggatagctggcttgatgtgccgatagtatgtagatgaggagattccgaggttgagatatgcttcctcatttgaggtgcagtagacatcaaagtaccttgcctggaggatgttgaaataggtgcctccattgggcggcgtgtccttcacgagcaccagggcatcctccataacggacagaagctgcatggagtggcccatctcggcaaggcgatcggcgatgcgtttccggtcagtgtcacggtcatagtcgatggccagattgatgaagtcggagatgctttgccgtctaccttcatagcactcttcttccatctcaccgatgcgagaggcagtccttcgaacggcggggccgtaaatctggagcagcgccaaagtcttatcaatatcctcctcggtgagggtactggtgatgtcaaaggttttcaagtagttctggaatttactcattattcgtcctttctgccaggcctctttaatggtaaaagttgaaggagccaagaactttggcataggccttggacttattgtggaggatgcgcttttcgccgtccgccttgactttacgatctttcaggtagagatagagtgcgaagactccattttccttcacgacgatcaggtcaccgtcattgatctcggctgccctctgacagaacaacacgctgccggtggaaataccgtgctcctgataacgatgtccatcggccataatgcaaaaacactttttgggaatcagaccagaaaatccgtcgatctggatggagccatagccattgctcaaaatggggtgtctggcttgagtcgtttcaactgctgcgtttatagtcaatacctcctcagtgatacataacagagggcatcttgtattcaacctcccgatgggcaggcatcttcagccccgtggtgagtgcggcgaaattgatggaatggaggccatagcggcgacggatgtcttccatggtgcgctccaggatgaggcgcttgttgtgcttggtaaagtctgaccagagatcgagctggatcggcgtgtcagacgggataaggtcgattgcgctgatggtcagagaccggatattgttgttccaggtatgcttcttgcagaacagttcaaagcctgccgctgcaatttccgtgtagctttgcgttggaaatgtcagttttccttggtattcccgatgcgagagggtgttgtcgcggacgctgatgcggacccgtgtggcagccagcttattcttccggagcttcagcccaacttcctgagaaagctccatgagaacatggcgcacttcatctttcgagagcaagtcatccgtgcaggtaatgccgtgaccaacgcttttgatgggaggatcatagtcgcagggcatcacgcgggactgatcaagtccattggcgaagatccacagtttctcgccgttgattccgagcagtcggacaagcatctgacgatctgctttggccagatctccgatggtgtggatcccgtagcaccgcagtctttctgtggtggctcgtccaacatagagaagttccgacgctggcaggggccagatttgctccttgaaggacgcttccgtgatttctgttacggcatccggtttcttcatatcggatcccagcttggcgaaaatcttattgaagctgaccccgatagatacggtaagccctacttcttcctttactgcctttcggatctcgttggctatctcggccggtgtcttatgtgccaaaaggggcgagccggtgagctcgatccaactctcatcgatgccgaaggactccacttccggggaataccgcagatagattgcacgcacaatcctggaaaacttcaggtactgatccatgtgcggagggacgatcgttaattgcggacacttttggcgcgcctcccaaatcacttcacctgtcttcaccccacactgctttgccaactgattctttgcaagaacaattccatgacgatcctccgtgctgccgcaaaccgcaatgtactttccacgcaattccggatgcagcatacattcaatactcgcatagcagttattgaggtcgctatgcaatacaacccgacctcccatattcggtgtgcctcctgtctgtggcttttaagaaaagttccaatcaagttcctaaaagttcctattgacaagttccactttccagaatataatgaggctaaagttccaaccaagttctaaatagttccataaaagttctaacaacaaaatagcaggtcgaagataggtttgtcaatagaactttcaaaaacttttcccgatctgcagaaagaggcacagttatgaaaacgactggagaaaaaatcagagaaggccgtgcaaacctgggcattacccagactgagctggccgaaaagattggcgttacgctgcgcacgatctccaaatatgaaaagcagggtgtgatgcctcgtggcgccaatttgcaaaagctggccgaggttcttggcgtttccatcgcatatctgagcaacgatgagatcgtagatcccgcttacggactcgaggaatctccttacattgagagtgctcgggcagtctacggtaagagaggcgccgctgatgtcgagcaactactgactcagaccagagccctcttcgccggtggcgatgtaccggaggaagataaggaactcttcttccaggcagtcaccgaggcttattttgccaacaagcagcgtgccagcgagaagttcacccgcaaggattataagaaataagccggatcatctctgtgtgtacggattattggacaccccttttggtacctttatgctgtacgataggctattctacttctgaagtgaggtgagtggattgctgacgatggcgattaaacaggaagcaaatcgtttgaaaatgaaataccagactaccgacccgtatgatatttgcacgagcatggacatccaggtaataaagcggcctatgggcgcaagcgcccaatcctgcaagggctttttcctggtctcttcccggtgcaagctgatcgtgatcaacagtgatttacccgaaagcattcaacggattatcatagctcatgagctgggacatgctgttcttcacagcgattcggccatcagcgcattccatgagtttgcgatgtttgatgacacggatcgtatggagtatgaggcaaatgtgttcgctgcggagttcatgctgagtgatgacgaggtcatggagtctctggagatgcagatggacttcttccagatggccagatgtctgtatgtaccgcccgagctgctggacttcaagctgcgaatcttgcagcggcagggcatcaagatcaatgccccttacatcgcacatggggattttctcaagcgcgatctggggcagcctctgaattgagtatgttaccgggggcagcatttaaggtctatgtcaatgtttttgtagagcacactaccgagggactaatgcttccacgcacaatagtctgggaagacggtctgaaatatgacatagaccgagtgattgatattcggcctgcctatgcagcaaaggcaggtggacaaggcgaccgttataccattcaggttaacggagcacgaacctatctatattttgaacgctcctccaatccgaccgacacgaagatcgggcgctggtttgttgagcgcaaagtgcctttgaaggaatttttatgagaactgatgataaaaagcaccaatgctggttgaacgagggtgagacgatccgctcgttccatccggtgttagattgtgcgcttcgtgagtttgcggaccacgatgcctttgtgagctttatttttgagatggttgatattttttgatttcgagtaagtgaggaggtaacaatgtatagcgctgctatccaaagatatttcaatgagcacatccatctgccgtattccttcttccagcagcctcagcgttttatccgacatgcgctcaagaagaagggtgcgttcatggcaaccgcatacaactatgtcgagcccagcgaggctgacaatgaagacattatcgagtatcttgctacagacttcgatgtcatagccggcaacacggctggccggctctgcattttaatgaagcttccagagcccacgatgcctctgcactgtaagatgattggttgctccatcaagcaggatgggagcaatcccatctggcgcacgatcgagctgactgagcaaggaactctgctcctgtgtggttggggcgaaggccatacacatatgacgatttgtgaggtgggctctgagcccgatcaattcattcctcgcttaacgcaggaactggccactgctacggctttttggtctcatgtcactggtacaggtttccctgtggctggacgaccttgatgagatatcccaaaaaactgaataaagacggaaggatcgatctctgttgaatgggatcgatcctttttcgtctggaaagcagaattaggtattctggcacgagtaaagctccaatggtattctgactctgtacttattagatttcatctccgttatggagcttcataagctgtgagccaacacattctggcatttctgggcggacaatttgtttcgccgctctctttgcgctttgatttgaattttcagatcagagcgctctttttttgtccaaattccgtattgcgggtttgagaattatttatttgaaaggtggaacaagcaaatgatggaaagcaaagtattcgcggacaacttcagtcgtagcttcagcgagtcgggggacttctttcagttcctcagcgctcggcaggcccgcagcaagtggatgacagctccgtccaaggaactccggtttgagccggtggaacggggatccacgctcggaaatctgtatatgcagatctacgaccacaacggcgatgcagatgttctggaggacacgatggagaataccagcctcctgttgaaggtggatggtaaggactacccggtccgttcctgtgctctcaagaccgttctggagcgtgcccgcatctccggtcatgccctcaacaaagtttccaaaagcgtattcgctgagattctcaactactgcatgggcgttgcctccggcgacagcctgatcaaagtcgcagatgagaaggtatcggcagtacacggtggagatcccaaggactacacggtcatggagatgctgcccctgttcaaagtgaccaatgactttctcgatcgagagtatcccggtaatcgcttcatgaccgcacacttcgatcactctatcgcaaccgctatctggcgcctggatggtcaggcagacaaactccttgatacataccaccgggagattgccgccaaaggcctgcgtgccgacaaactggttcccgcactgcgtttctccacctccgatgtcggcatgagtggagcgaacctctatccgatcttcctggccggcgcagagtcccggattatcccactgggatatcccatccgcaccgagcacaagaacggatctggcatggagtacttcgaggagcagcttggtctggtctatgcgcagttcgagaaagcagtcgataagcaggttcagctcatgaacatcgagatccgctatcccgttactaccttaatgcgggtgctgaagcggatcaaggcgcccaagaaggcttcctatgaggcgatggactactttatggccattcacggtgatgtgccctgtacggcgtatgacctgttcatgcagatgagcgatgttatcttctccgcccagtgtgacggcgcatccggtatgcgcattgcacagcttgaggagatcgtcagccgggcactgaatgtgaactggcacgagtatgatcaccctggcgacttcaagtggtgattgcgatggccaaagctgtttactacccgaagggtgagaggcaaaagaccatcatcaagcttttgaactctctggaagggcgctattccaggtgggatatttggcaggatttcattgtcctgtctgccgtcagcattgccaatgctttcggtggcccatacagagagcaacgcgaagcgatgtatctggagcgtagcaaaaaatactcaacctccgagctggaagtcttagcgcagatgctcgccgaagttgtcgatgagatggagcaaaatccagatcaggatatgcttggcgagctgttcatggcattgggccttgcgaatgagtggaaggggcagttctttacaccctatgacatctgcagagcgatggcagccatgaatctgggtgaggatttgaaaagtcagatagaggaaaaaggctgggtatctgtgagtgatcccgcctgtggggccggcgcattactgcttgccttcgcaaacgagtgcaaaaggaaccacatcaactatcagacttccgttttctttgtcgcgcaagacattgacttcttggcgggctgcatgtgctacatccagatgagcctactcggctgtcccggctatgtggtcattgacgattccatcctccatccggcgcagagctacgatgaggacggacttatccccaagaacagccccaatgtctggctcaccccgatgtatttcagggatgtctggcattggcggagaattttcgcacagctggacctaattactcagacaaaggagagaacgcatggaaaacctgacatgtaagggactgagtgccgctcatcggagaatgctgattaaatgcattaccgaagagattggcagcattcctgaaccggtggaaatcgagttcatggagcccattcgacggaaacagtattcatcgctatggtacggcggccagatcgctgccattcgggttcacggttgcgtttttgaggtccatgcattaggcgatgtctacgcatggctctatgacaagagcgaccgcgatcgcgaactgctctatgtgaaggacaagaacaactccggccgatttggatcggatatccagccttatctcaagactgaccgtgctttggtagcagcaatctgcaggaagcacaatcggtattggatcgatatggagcacaacaactggtgggaatgtttcgtccgtacccccgatggcgagaggcacgatctcatgtgggtgcttgacagcgaccacatttttgctggaatcggtgaggtgttctatcacatggacgcagttctgaaggatctcggtgtcccggcgggaaacgaggctacggaggtgtcatcatgagcagttttcgaattcccttggtttggcagatgtacgggcatgtgaatgtagaggctgataccctggacgacgctatcgaatacgccttgggaccggattgtccgcttcctgaaggcgagtatgtagatgactcgatccaggtggacgatctggttttgaaccaggaggcaacccatgaaagccatcaatgagcactttgaagttgggcagcaatactatgctctcgtcagtaaagaggtgttggtggtgtctgaagttttgcagcctggaatgtacccgtcaggctccggaggataccatacgctccggtcgccgatggttcggttcagaagtgagaagactggcttagtgcatacctgcagccttgagctggccaagcatctgctgcttgccaagcgacagacagcaaaagaaaaaggagttggttgatcatgaataaggcacgacgcttcgtcattgagattccgcttggaaagcttgaggtctacgccaagcacgataagagcgattgtgcggaagactatcccggcgtctttatcgactttgtacgcgaggatggcgccacggtcgttctggcttgtgtggagtatgatccggacaaagatttgctccagacagtcgtctatggcgattgcgcatcggacgagccaacagcgattgttgaacactacaacactgattttgaagaatgaggaggatcgattatgcctaattgggcgtttggaaatgttaaggtgactggtactcgcgagggtgttaagtcctttgtggaacgtttcatcagcagcgatgatcaatcaactgtccccggaaagcggttttttgcccggagtttttccgagcagaagcgagagcagagcgtcaaggatgccatggaagaattcgaagggaaagcagataacgaaactgctgagcattccttcctcatcatgtttgcctggtctgtttggtcctgcatgattgatggttacccccagcgaaatgatgccgagtgcatcacgctgagtgaggcctgtatggaggatcatgtagctgttgaaatccgctctacggagaccggaatgtgctttgaggaacatgtcacctgcgacgaggacggcaatctcaaccatgccgaacgagacctgagccgctgcaagtgccgcaactgcggcgagatcagccacttcggatcctttgaggatctggacgatgctgaatgctcggaatgcggtgaatgtggtttcgatcgttgtgaggaggagtgaattatggcgctgaatttgaattacacacccaataagctggtcgatatcaccaccctcactgaggatcagtggttggactggcggcgcaaagggattggcggcagcgatgtagctgtcgcccttaactcctctccgtatcgcacggccagagagctctactatgacaagatcggagtggtcatggcagatgaaggcccggataagagcatcactttccaaattgggcatctgctcgaggatgtggtggctcagatcttcgccaagaagaccggcctgtctgtctttgaagaccactggatgtaccagcatcctattttcccgttcctgattgccgatgtagaccggttcgttatgcttccggatggtcgaaaggccatcctcgaatgcaaaaccgcgcactatgatatgcagttcaagtgggcgaatggctctgtgccacgccattatgagctgcaggtgcgacactacatggccgtcatgaacatcgatgtcgcctttatcgcatgcctgttttccaacaatgagaacgacttcgtatggcagaagattgagcgtgacctcgatgaggaggagaatacgattatggagctggaggcgttctggcgcaatcatgttctggctcgtgtggaaccgcctctggtagaaaagccggatgcagtgctggagtcccttcgtcgttatttcgggccggccgataagtctgagccgagtgttgatttggactgcaagttccttggcagcctgaaagaaattctgaacctgaaggaggaaaagaaggtgatcgatgcgcagtccaaagcattggagacacgcattaagtcgctctacgcccccattgtcgagcaaatggggactgcctgcaaggcgtcctgtgagcacggcagtgagtgcttcagagtaacctacaatcctcaatacagggaaggaatcaacaaggacaggctgtcagcgctgagagcgcagtatccggaaatctacgacgagttcgtcgatcagacagaattgagaattttcaaggtggtcaagacggccatcgcataaggagtgatcgaatgctatgtcgatatgagcgcaccatcttcaagtcggataagggcttctgcatcttctcctacagcaccgaggatccgtcggttcccaaggaagcgcgcaaccgatcgttctaccatgacgacaaaatccacttcacggcaatcggctatcatctcgtggcttccaatgcagtggaggtagagctggagggcatctgggagaactcgaagcatggtcttcagttatcggtctcgatgtgtaaggagatcgttcctgtagatcaggccggtatcctcgcatacctgagtagtggtgtaattaagggcgttggcccggaaattgccaaagccattgttgcaaggtttggggataagaccatggaggtgctggacaaggagccacagaagctgctgagcatcaagggaattgcccagaggaagctcaaggccatcatcgcctcctatgaggagacaacggccctgagcgaccttatgatctacttggcgccgtttggcgtttcaatgaagaaggctgcgatgatcaaagaagagttcggcgacaacagcctgaagatcgtgaagtcggatcccttccagctttgtaagatcaaagggtttggctttatgaccgtggattcgattgcccgcaaaaccaaggtaagcctaaagcatcctatgcgatactctggcgcaatcaattatgtgctggatgaggcaagggtatctggacatctcttcctgaccgttgatgagactgtgggccaatgctatgacctgctcaactcggattgtgaagaagaggtggtctccgaggaggatatccgacaggccatcacgaatgagcgtgttgagtcccgtgtctatgttgagggatctcgtgtgtacctgagctatgagcgtatgtgtgaggtcaaagctgctaagcggattgtgtccatgctcctccaggaagggttcgatgagatccgtgacctggatgaaaagatcgatcgggcggaaaaaaacttgcatcagaggctggccccttctcagcgcaatgctgtgaagctgtgcttgtcctatcccatatccatcatgactggtggaccgggcagcggcaagacgacgacgctaaggtttatcttggacatctaccaggcagcgttcccgtcaaacgagatccttttggctgcacccaccggtagagccagccggcgaatgtcggagcaaacgggcaaatatgcctccacgcttcactctgctcttggtctggtcaccgaagaggatagtccactcaacgatacggaaatgctttctgcagatcttatcgtggtggatgagttctctatggtggatatgcgccttgcgtatgtgctgctggagcgaatcaagccaggagcccaactgatcatcgtaggtgatgctgaccagcttccatctgtcggtgccggcaatgtgttacgggagatgatccgtagcgagaaggtgccaacggcagttttggaaacggtattccggcaggcatccaatagtcggatcatcaccaatgcccatgcaatcaatcataatgacacacacttacagtatgggaatgacttccaaatgctcgaagtgcaaaactcggaagaggcagcgcagctggtcattaaaaactatctgcgcgaagttgcaattcatggcatagaggatgttcagatcctatcgccgtttcggaagcgtggcgctgtggcgtccaatgcattgaacgagacgatacgggatctcgtaaaccctccgaacaacttgaaaaaggaagtgaagtgtggcagccgggtcttccgtgtgggcgatcgcattatgcagactgtaaacaggatcaatgtgtcgaatggcgatgtcggtatcataaccgacatggagacagaggatgatgatacgatcgtgcgtgtcaagcttctggatgggcgtgagctgagctattcgcaggaaatgttggaggaccttgagttttcctactgtacgaccatccataagagccaaggacaagagtatccggtcatcatcgttcctcttctgaaggagcactatatcatgttgcggcgaaacctgctctatacagcggtgaccagagccaaggcaaaggttattctgatcgggcagaaacaagccgtatttattgcgatccacaaatgtgatgtgggtcaacggaacaccgtcctcgctgatcgaatcgtggcttactacaaccgcgagctcagcaagcgagtgacttgatttttgggaagcggggtggtcagatgccacctcgtttctacatttattatgaagggaagactcaacatgagtgaattgaacacgaacgcgatcccggccatcaatgccgttgaaggatttaaccctgctgactttgtgcgtaacaccgttggagaagaaggtgaaagcgatctctatttggatgtcaagtaccgactcctctggttccggctgcattgcccgaatggcaagatcgatccggagcttgtacatctagacgagaagagcgctgttgtctgctgcaaggtctacgcagacaaggctgaccctgctgaccagttcattgggaaagcctactctcagcgctttccgactgaggagcgttttggcgaccgctttttggagattgccgaaacggtggcgaaagggcgcgcactggccgatgccggctatggtacgcagttctgcatgaatggcgaagcgctggcaagcattatcgcagacgctcccatcaaaatgccgcctgatgaagacgccgaacatccgggaaatgtagcggccagctataccgcgcagccgatgcctcctgcagttccggctcagagtgctccggtgcctcagcctcctcagcagacgcagcctcagacacccgcacagcaaccgaaagcagctgtacctgaaccgcctaagacggttgatgagtatatgagagtcatgaccatcgagctggccaaggctgttaaggttgatttcggccgctttaacggatggactctgggggacattgccatgaagaatcccggtgatttggcgtggtatgtgaagaactattccggccataatcttgcactcaaagccggcgccacaaagttgctggaagcagttggccagatggccagttgactgtgcccctcaccgagggaggtgattgataatgggcagaaaaccagatctgccatgtgatatcgaacaggtagttgatttgcttggaattgaagtgatccgagataccggcacacaactacattgtcgatgtccattctgcgcagatcgaaaagctcatatgaatgtgaagatacgggacaacgtgtttcggtgtaaccgctgcggcaaaggtgggggcatcctccacctttacgcagagttttgcgaagtcaccctccatacggcctatgaggagctttgtaagatattcggttccgacagcaatgaaaagccgcgtgagtataagcgaaagcggaaagcgattgagacagtggaacttccaatagcctcagccgaggtacgggataacacctattcaaatttgctctcacttttgactctgtgccccacacatcaagcatcgctgaaggaacgaggtctgacccaagatgagattgactggcttggctatcgaacaacccccacgacacgcctgagacggatcgtgactgagttgctggagcgcggttgtattcttgatggtgtcccaggcttctattgccagaaagataccgggcagtggacgctcgacatcagaggttctggaatcatgcttccggatcgaaatcttaatgggcaaattgaggccattcaggttcgactcgataaggtttataaccagaagttctataacctaacgagcatcgatcagtactatgggacacagtccaagtgctgtccacattatgtcggggttcacgaaggcgacgaggtagtctgtctcacagaaggcgtgatgaaggcagatattgcctacaattttgcgcttggcacctcatatgaaagtggttttgtcggccttaccggagtgccaagctattcccagttcgagcgtgcgcttgaagagcttaactctatcggcgtggtacgaatcaacattatggttgactcggactaccaggtcaaagaagaggtccgaaaggcgcgtgatcgctatatcgaaatgggggttgctgctggctttgaggtggctccgattacctggacacaaaagcggaaaggcgtagatgatctctataagcaccttttccggaacaaatgattatgacttgggctgcagcattttagctgcagccctctgcgtatgaggaggatctatatggttcctattgaaacccaagagcgaccgaacatcaagtcagtctatacctgctcgaactgtgagaaggctctgtttgatggcgataacgaccatccgagatggaacttctgccccatgtgcggccaggagattgagtgggataaaactgcaacggtcgtttgggaagagaaaaactgtaatgtctgtggcggttggcttgttaagcgccacccagcaggtttttggtatgcctcaagcgactacattgggatggatacctgctacacctgttggctcgaggagtgccttgcgaccaactgccttggctgtaagcgagggaactatccagactgcaagtggattgatttgaaaaagtcttatcaagaggaagacaaatgagcgttgagatctatattgatgacttgaagcctgacattcaaagacaggtattggaagagctgggtctcgaaactgcagaagatgggaattatgatattatccctcttttcagcgtcgagaggccggaatgatttttggggctgctcataattttttgataagagagggtggtcaaacaccccctcatttctacattcattatgaggagtgaactgctggaataatccaaataatactagggataatatcccaaggaggtgctatcggtattatggaagaacctaagattacttctggtacagtgccatatatcgcatccgaaatccctgatgatccaagagatatcacacccgagcagtgggaagcgatgaaggcggttgatattcggacagtagacaagtctcagcttgtggacttgagcaccgttcacattgatgaatccttgcctgtgcgtgaaagagtgctcagttatctgaagcaagtgaagaatccatactgtgtccgagtgggcaactttgctgtcaaggtgaaatacaaagaggacgggccatcctttgaggaagtgttcaagcatctactgcagcagcagagcatgatgtaattcttgccaggtccgtttttcatctggataaagggccatagatgtggtataatagcctcggactaaatcaagcatactcactccttaggcagacagaccacgccaaaggagtgagattatgcagaataatgcgaatgagatggctgtgtttaataccgccatttatgtgcgtctttccaaggaagacatcgttgcggcgcaatctggccgtgagagcaacagcattaccaaccagaagcagcttattctggactttctgaaggataagcctgaatttaatattgtctccattcgtatagacgatggatatacagggacgaattttgaccgtccagcctttcagcgcatgctgaacgatattaaggctggacggatcaattgcgtggtcgtaaaagacctgtcccgtttcggaagagagtatatcaattccggaaagtatatccaccgtctatttcctgttttaggggtgcgcttaatcgctatcaatgacaacatcgacacgattacccgtgacgagagtagcgagtttagcatcacgctcaagaacttgatgaatgacaactacagccgtgacatctcagtgaaggtcagaagccagctgcaggtgaagcggaaacatggtgactttatttgtccgtttgcaccgtatgggtaccagaagtgcgagggaaaccacaatcgaattgagcccgatccctatgctgccacagttgtccaggatattttcaactggaaaattcaaggcatgacgaacaatggcatagcaattcggcttgcagagagcggaattcttgcgccgctggagtataagcgccacaagggagagccgttattctccggcttcaaaatgaaggaacggtgcgaatggacagcgcaggcagttgcgcggatactcactaacccgatctatattggaaccctccgccaaggtcttcgccgtagaccaaactataaaatcaagaaatcaataccaacagaagaaaacgagtgggttgtgatccacgacgcccatgagcctgttgtcacgaagaggacattctatcttgctcaaaaagctcttctgatagatacgcgagcagcaccacgagcaacgacagtttatccgctatccggcttgttggaatgcggagaatgcgggaacgcagttactcgaagcacaattaacaacggatataagttatacagctatttccgctgcagcgtgcgcacgaaagaggatcgctgtgaactcaagcaggtaccagaggcacaggttgaggcagctgtccttcagctattgcaagagcatatcagcgcggtggttgagctcgaccggtgtctatctgaaattcagcaggtgccatatcagaaaatcaatgttgccaagtgtgagcagcgcagagaaaaacttgcggcagaaatcgctcgttatcgcgatctgaaggcatctctctatgaagatatgaaagaaggactcatttcgaagactgacttctgtgacatcagaggtcagtatgatgcaagaattgccgatgcgctgattgctcaggagcagatcgaccgagaactcagtatctatctctcgggcgaacagtccccgaacaactggatgaagacatttaccgaacatcgaggattgaaatcactcacgcgggcagttgttctggagtgcattgaaaaagttgttattcacaaagacgaaaagttggaaatcatctttgagcattccgaggactatgcccgtttggtgagcagcctgcaggaatatgccgcgcgtggaatactaggggaggcgatgtaagcatggcaagaaagagcagaaaaaatgtccaagccacacccgcagttgttgtaggccccgtccagtacaaggtagcgctctatgccagaatctcggttgagaacgaacaaaagcgagaagcagacaccataggtaatcagattgcgttgctgaaggactttgtttcccagcatcaggatttagttgtctttgacctctattgtgatgacgatatctcgggagttagctttgtgcgcccggaattcgctcgaatgatgaatgacatccgagctggcaaggtgacctgtgtgattgtcaaagacttgtctcgtctggggcgaaatatgattgagagcggtgagtatattgagcagatctttccgagaatgggtgtgcgctttatctccgttaccgatcgctttgactcattgcgggatgatgccgacatttcaatccaactgaaaaattttgcaaacgaggcatatgcgagagacatttccaagaagattcgggcggtgaaacggacgcagcagcttgctggtaagtggaccactggcactccgccatatggatatatgttagatccggatgacaagtaccacctatttcctgatccgcaaacgggaccaatcgtccttgccattttccgtatggtggcagagaatcatactctccacttcatagcgaaaactctgaatgagcaaggggtgcccagtcccggacgctatctgtacgatattggtttgcggaagacggagaagttcaaaaatgccatctggtatctgcaaacgatcaagaaaattcttgtcgatccggtctatcttggttggattgtgtccggaaagtacagaagccagctgtgcgagcgggggacaaagactacagttaaaacgcccgaagaggaatggattatcaataaaggtatgcatgaacccattgtttccaaagagctttttgataaggttcaggacatcctctcggctaggcaaagtgaacagggccttgcgactatctacgattccaagagtaaacgaagaagtatgttcaaaggaattcttcgttgcggagaatgtggtcgcagtatgtacttgcgcagtaaatctaatcgcggttattactattattgcactctccatgagaattacaatgccaccatttgtcccaagaaagcggtcaaacaggaggatgtagagtcccttgccctgcggcttatccaaactcagataagagcattctccgatgcccagagactgattgccaacttgaatgctacgccttcttcgcagacccgctatcagatatatgaaacccagattgatgatgcaaagagaaaaattgaaaagttcaatcagctgaaggcagccctgtatggcgattttgcagatgggcttcttagccatcaagattacacagatctgagcgaggactactctaggagggcggatgatttgaggatctttattgctgaattggagaaggaaaaggaaaagtactcagtgggatttggcagcaaaatgcagtgggcactgttgattgaaaagtataaggatcaggagtcccttgacgctgaaatggcagcagccttcattgagacgcttaccttgtttaacgatggccatgttgaagtggcattccgccatcgtgatgagattgaacaggttctctatgtcgctgcgacccgaggaaaggaggcggagagatatgccggataaggtgctggcgttttatattcgtttgtcgagtgaagaccgagatctaaaaacaaatgcattgaagaatgagagtaacagtgttttcaaccaaaggcggttactccaggattactatgatacacatgaatcgctccatggttataaagtgatcgtgttctgcgatgacggtgtcacgggaacacattttgacaggccaaagttcgatgagctaattgagatggctcgcaatcaggaaattcattgcattatggtgaaggacctatctcgtttcggaagaaactttcttgagatgggaaactacctcgaactgatcctgcctctttatggggtccgctttatctctatcaatgatgcctttgatagtgatgactacttaggtgtcacgggcggacttgagttagccctccgcaatctcatcaataatatgtatagccgagatctatcaaccaaggtgcgctcagcttttcgtacccgcaatctgcgtggtgaatactggggaggaaacggcttctatggctaccaagtccatcctcataacaaaaagagattgatcgtagatgagcaggttcgtgacatcattgtcatgattttcgagtcctgcgttacaggcatgaccacgagcgagatcgctcaaatgctgaatgatatgggcattccatccccgttagagcataaacggcgaaatggcgggttttataatggggtggtcaaggaagagactggaatctggctcaagggggctgctcgaaagattttgactgatgaacgctataccggtaagatgattaccaatactcgagagacagaagaagtaggaaagcctaagatgcgatcattgccccgagatcaatggatcatagtgccaggtacacatgaagcaatcatttcggaggagttgttccgaacggcacagaatgcgctccaagggcgtattcggaatgttaacaagaatactgccggaaaccgagccaacaatctgtttgtttgtggctgctgcgggaggaagctccgaaagaatccagcaaaggaaccacaccttgtttgcccgaaaaaagacagtattaagggtgctgagtgtgcgggtctctttgtcaatcaggcccaaattgagcaagctgttcttcagatgctgcgggaacaaagtaggaacttccttgagcagcattgtttgatgcaggcatgcattgacaaaaagctttcaagtattcaaacggagcttgatgctaacaccaatatgacaagacggctccaaagtagaaaggctgaactatatgagcaataccgagcgggtcgcataagcagagagaaatttgctgatatccagaagacaggttcagagaagctggcaagactctcaagtagagctgaagagatcaagcggcttctggtagagcactatgagtctcgaggtaatcttgcggcgggaaaaagaacagcagatcagatcatcctgcttaaagattatgatccggaaataattagaaattttgtagagcgggttcgtgtgtacccttcaggagagattgagatagatatgcgtacttcgagcgggtttgaatttgtaacggcaagctaaaacaataagcgccccccactttggaggcagctgaaaaaattccgaaaaaactgtatgtctatcttgacacaaccagagggcttcatcaccggtatggcgtcaaagatgttcgtcgtcgcggggccggtcatcgtgttcggcacgctcgcaagcgttgtgtacggcgttatcctgatgctgctgtgagaaaaaaaggagcgccgcggcgctctcttttttcgcacacgtccgcgccatttcgtcaagggggcaaattgacgaaatttgctttctccctctttcaccgcgtggaggaagcggaagcatgtccattcatggtttatccgcggttattctgttgacataacgatgtggaaaactctgtggaaactgtgaataactttgttgctccagtgcgttcccgccggttaacgctttgttatgttcgacgtctttcggcataattggcgcagaaattcccgcgaatttctgcattttcccgccaaaggcaaaaatctgccgcggccacttgccattgtggtcaaaaaatcgtataatgtaccaagttttgtgtttgaagatcagaatcgtaaatttcggcgaaatggagaaaccccaatggcagaagcaaaaaaaacgaattacggcaacgagagcatctcgtccctcaagggcgcggaccgtgtgcgcaagcgcccgggcgtcatcttcggctcggacggactggacggctgcgagcacgccgtgttcgagatcctttcgaactccatcgacgaagcgcgcgagggccacggcaagctcatcaccgtcacccgctacttagaccacagcatcgaagtagaggacatgggccgcggctgccctgtggactataaccccaaggaaaagcgcttcaactgggagctcgtgtactgcgagctctacgccggcggcaagtacaataacctcgacggcgacaattacgaatactccctcggcctcaacggtctcggcgcctgcgcgacgcagtattcctcgcgctatatggacgtgaccgtctggcgcgacgggaacaaatactccctgcactttgaacgcggcgagcccgtgggcaaaaagggcgacgagctcagggtcgagccgaccgaccgcggccgcaagaccggcacgcgcacgcgctggctgcccgacctcgacgtgtttaccgatatcgacattcccgccgactactatgtcgaaacgctgcgccgtcaggccgtcgtcaacgcgggcatcacgttccgcttcaaaaacgaagtcctccccggccacttcgagacgcaggacttcgtctacaaaaacggcatcatcgactatgtcgccgagatcgcgggtgaagacgccctgaccacccctgtcttctgggagacggagcgccgcggccgcgaccgcgaggacaagcccgaatacaaggtcaagctctcctgcgcgtgctgcttctcgaataaggtgcagcgcatcgagcactatcacaactcctcgtggctcgagcacggcggcagcccggaaaaggcgtcaaagactgcctttgtctacgccatcgacaagtatttgaaggacaacaacaaataccagaagggcgaagcgcgcatcgcctggcaagacatcgaagactgcatcattctcgtctcgaacaacttctccacgcagacgagctacgaaaaccagacgaaaaaggccatcacgaacaagttcgtgcaggaggcgatgacggactttctgaagtcccgcctcgagacctatttcatcgaaaaccgcgtcgacgcgctcaagatcgccgagcaggtgctcatcaacaaaagaagccgcgagagcgcggaaaagcagcgcctgaacatcaagaaaaagctctccggcagcatcgacatctcaaaccgcgtcgaaaagtttgtcgactgccgcacgcgcgacgtctcgcgccgcgagatctacatcgtcgagggcgacagcgccctcggcagcgtcaagctctcgcgcgacggcgagtttcagggcatcatgcccgtgcgcggcaagatcttaaactgtctcaaggccgactatccgcgcattttcaagagtgagatcatcaccgaccttttgaaggtcctcggctgcggcgtcgaggtgccgggcaagtttgtcaaggacctgaacgcctttgatatcaacaatcttcgctggaacaaggtcatcctctgcaccgatgccgatgtcgacggcttccaaatccggacgctcatcctgacgatgatctaccgcctctgcccgacactgatccgcgagggctatgtctacatcgccgagaccccgctttttgagatcacctgcggcgaaaagacgtggttcgcctacacggacaaggagaaaaacgacatcgtcaagacccttgaaggcaagcgctacaaggtcgaccgctcgaaaggtctcggcgaaaacgaccccgaaatgatgtggctcacgaccatgaaccctgagacgcgccgtctcatcaaggtcatgcccgaggacgcggaagcgacggcgcactcgttcgacctgctgctcggcgacaatttgcagggccgcaaggaccacattgccgaaaacggctacaaatacctcgaaatgatcgacgtatcgtaatacgaacaagcaggaaaggagccttactttatggaaggcattttacttcacgttctctatcgcggcgaaaaggctaatgactttgcatcggagatggagcgaagcggcctgcgcgccgccgtcctcgcggaagagggctgcatgcagtacgactactaccggcctcttgccgaggaaaactgcgtgctgctcgtggagcactggcgcgaccgcgccgcgctcgacaagcactccgtgggcaagccgatggcaaagctcaaggcgctcaaggcaagctacgacctcgcaacgaccgttgagcgctttgaatgaggaggagcgcatccagggcaaaaaatcaggaatctactaaggagttttgatagccatgaaaaagatagttcttaaaactgtgatagggattcttcttgcttgcagcttatttgttggttttctttatgtaagcagcgatattggcatagcatcagggaatctagagactgacattcgttcgtcgcagaagatcaaggaggattgggcgatcgatggaagtgtttctgacacaatggctgcatatatttcttatccgcaggacatgagcgaccacactttttccgtctatgtcaatcgcccgggactttccttcggatatttcttccgcgcgggcggaaaactctcggagattcaggaaggaattgcagagttcaccacagagggtgctaatgagcgcgcattgatttccatgaatcagcagcaggtgcagcagcttcaaattgatgatggccacgccaaacaagcgatcgatatcgacagcgatcagccctttgcgatcgtcctgccgatcaatgcgggcagcattactttttatgacgtgaacggaaatgctgtagaatattggaatcatcctctttaacagcttccggtttgccaagccggcttcatcccttcaagggcaaaaagtcctcgcatcattcgaccgcaaaaaatctttgcacaagcatgaagacccgaccgatgagcatccatcggtcgggtcttctgtctgatgcgtcccttttttcacgccttctgcgcaccgacgtcgccgagggcggcggccgccgctttctcccgccggcgcacgcagagcgtgccgttttccgccgccaaaaccgccgtgtcgccgcttgcgagcgtgccgtccaaaaggcaagtcgcgagcgcgtcctccacctcgctgcggatgagccgccgcaggggacgcgcgccgtaggaaacatcgtagccccgctcggcgagggaaaccgcgcagtcctcgttcgcctcgagcgtgatgccgagcgccgcggcgcgggaaatggtctgcgcaagcagccgccgcgcgatctcggcgcagtcctcgcgcgataagcggcgaaagacgatcgtctcgtccacgcggttcaaaaattccggccggaacgtccgccgcagctccgcgatcaccgccgccttcacggcagcgaactgcgcgtcggcgcttttctgctcctccggcgcaaagccgagcggcgtgcccgccgccgtgatgctctttgccccgatgttcgacgtcatgatgaccgccgtgttgcgaaagtccaccttgcgcccctgcgcgtccgtcacgacgccgtcctctaaaatttgcagcaggatgttccacacgtcctcatgcgctttttcgatctcatcgaaaagcacaacggagtatggcttgcgccgcaccttttccgtcagctgcccgccctcgtcgtagccgacgtagcccggcggtgagccgatcaggcgagagacggcgtgtttttccatatactcgctcatgtcgatgcggatcatcgcgtcctcgctgccaaataccgcctcggcgagcgctttactgagctccgtcttgcccacgcccgtgggcccgaggaagaggaacgacccgacaggccgtttcgggtccttgacgccgacgcgcccgcggcggatggcgcgcgccacagcgcacactgcctcgtcctgccccacaacgcgcgcatgaagcgtttcttcaagcgtcaaaagccgcgcgctttcgctctcgttgagccttgtcaccggaatgcccgtccagttcgacaccacggcggcgatgtcctccgccgtcacgcgcacagcggtcttttccgcctcgcgcgcctgttttttccgctcagctgccgcctgcgtgcggaagctctcctccgcgtcgcgcagccgcgccgccttttcatagtcctgcgcgcggatggcagtttccttgtcccgcgcggcggcgctcgccttctcttcgagcgctttcagttcgggcgaggcgctgcgcgcggacagtttcacgcttgccgccgcctcgtcgataaggtcgatagccttatccggcaaaaaacggtcgggcagataccgctttgagagcgtcaccgccgtgcgcagggcctcgtcctcgatggaaaggccgtgatacgcctcgtactttggccgcaggccttgtaagatctgcagcgctttttcttcgtccggctcgccgacctgcacgctctggaagcgccgctcgagcgcggcgtccttttcgatgaattttcggtactcctcgagcgtcgtcgcgccgatgacgcggatctccccgcgcccgagcgcgggctttaagatgttcgccgcgtccaccgccccctcggcgctgcccgcgccgacgatggtgtgcacttcgtcgatgaacaaaatgacattgccgtcgcgccgcacctcgtcgagcacggcgcggatgcgctcttcaaactcgccgcggtactttgtccctgccaccatgccggagagatcaagcagcaggatgcgcttgtcgataagctcctccggcacgtcgcccgccgcgatcttttcggcaagcccctcggcgatggccgtcttgccgacgcccggctcgccgatgagcacggggttatttttcgtccgccgcgtcaggatgcgcagcgcgcgggcgatctccttttcccgcccgatgacggggtcgagccgcccctcgcgcgccatcgccgtcagatcgcgcgtgaactccaagagcgtcttgccgtttttcgcctccgcgcggcttgcacgcacttcgggcagcgggagcttgcgcggcgacaggctcatcgcgcgcagcgtgtcgctgtacagctttttggtatccacacccagcgagcgcagcagcctcacggccatgttcccgctgtcgcgcaggatgccaagcagcaggtgtcccgcctcgatctctccgctgcccgcgcgcagcgcctcgccgacggccagctcgaccgcgcagcgcgcgtgcggcgtgagcccctgcacggtcgatctttccgccgtgccgcgccccagcttttcgatcatcctctcgcgcactgccggctcgtagatgcccgaggcattcagcgcgcggcaggccgcgtcgtcctcctcgcgcagcatcgcgagcagcaggtgctcgcagcccacatagccgtgccccagctcgcccgccgccgcctgcgcacagcgcagcacatgttcagccttcaggctgaatttccggtcattcatcgctctaccctccgcttccttttcgtcctttcatttttgaccggtttattcaaaaataaacaccgtaaatgacacagaaaattcaatattttcctgcattctgactcttgcattttcgctttgacatgctataatagcgacatcaacttatggaggtactaattatggcttatcagattagctctgcctgcgtcagctgcggtgcttgcgcagacgcctgccccgtcggtgctatttcccagggcgattcccagtatcagatcgacgcaaatgcctgcctggattgcggctcctgcgctgatacctgccccaacggcgccatctcccaggcctaaggtctaagggtacttaaaaaataaggacgcgcgaaagcgcgtccttatttttatcatcagaaagggtcatcacatggaaaaacgcgacgagctctggccgcatggcccctgcttttattacgacaccgccctcttcccgccggggacggacagcttttgcctcgcctactttgcccgcccgtcccgcggcgacacggtctgcgacctcggcagcgggatcggtcttctcggaacgctcctgctcgcgcgccaggaatcgctttttatcgaaaatgttgagctctccacgcccgcggcagcgcttgcgcgaaagacgttcgccgaaaacggctgggcggacagagccgctttccacgaaggcgaccttcgcgatgtctccgtcctgccaaaggccggcagcgtcgactatgtgatctcgaacccgccgtactttcccgccggcagcggcgagagcgccaaaggcgaagcgcgccaaatcgcgcgcgaggaaaccgcctgcacgctggacgacgtctgcgccgcggcgcagcgtgtgctgcgctatggcgggcgcttcaccctcgttcaccgcgccgagcgcctcgccgacgtgctctgcgccatgcggagtcacggcatcgagcccaagcgcctgcgctttctcgcaaaatcgccggacgccgcgccctcgctcctcttcgtcgagggaaagcgcggcggcaaaagcggccttgtcatcgagccgccgctcgtccccaacggcgaggaatgggacgccgtgtatttccgaaaataagaaaacgggccgccctttcgggcggcccaacagctttattatactaaagtgccggatgaactgcaagcattttctgccagttttcgaataatcagccctgcgcacaaaatatcgctcgcatctttatccattccgccgcttgatttttgagctcattcttgctattctttaagcacagaaagggtgagaccaatgtacaagtgatcttcacaaaggcgatcccaaatggttccgatcatatccatcgcgcagcactctctgatgtgtaccgtcattcaggtaaaaccgccgcaaccgcggtgtttgagatagcaggagtggaaaccggagtaagcgatattcggcaccagatcattgaagaaaggaaggaaagaaaacggaatatgagagatccaaatattcatcatggctgacccttgatcgtagttcagtaatcgcgatcaagggtcagtcattttttgttttctttcacttttttagaaaaattgaggaaaaatatcccgtgctctgcgcgagaggggtggcagcgccgatggcgctgcacggggcaaagggggaggttctcttttaaaagagaacctccccctttggaacccccaagagaaaagcagggggcgtttcgatttcgccccctgcaccccctaacgaccaaaagggaggggcgcaacccctcctttttggattatcctccccgcgcttctgacggcgcggcattgctgcgctcgccgctttggggtgctgcttttttagctttctgctggatcggtactgccaataggctcatcggggatgatgtcttgcgaaatgacttgctcttctgcatctaacagggctttttttaggacttcacgggcaaggatacctttgcccgcatcgtaaaggtcgatggcctcactcatattttggaccatcaaatgatatagagtcttatacgtcgtcattttcatcacctcgtttacaatttagaacagaatattcaaaaatgcaatagaataatttgttctacgtatactgtatttggtgataaacgtgaaaagataccggcgcatccgcgatttgcgggaagacgccgatttgacacagcgtcaggtcggcgaagcaatcaatgttccgcagcgcacatacgcatattacgagagtggcgaaagaatgctgccgccgcacgttttgtgcgcgctcgctgatttttatggcgtcagcgtcgactatcttctggaacgaactgataaaaagaacgaaaacgaccgctaatgcggtcgttttttcctattagaaatgcggcgagcgcagcaatgccgcctcggcaggcaccatcgaaacaaaatcgtccgaagtaggcgcaatgcttaccagaagtgccatggggtggataatccaaaaaggaggggcggggcccctcccttttggtcgttaggggtgcaggggcgagatcgaaacgcccctgccgttctcttgggggatcaaaagggggccttctctcacgtgagagaaggcccccttttgcttcagacttcacggaacgcttcaatgcgatagctcccgtctgggcgcacttccagcgtcaactcatcgtgcgttccttcgccgttctcgccgcgcggcgcgctccacagccggatgctgtcgccgtactgctcaccgcccaccggaataaaatatccggggccgaaatcgctcgtaaactcatagaatgcatcatactgtgcgaggtacgtcacaccatcctgattgcgcagatcgtccaccgtgatatccgcccactgcgtcaaaagcgcggaaacgtcactcttgggaatgcgccgcacggggaccgcccagtcatccggcaccttgaacctctccgcatcctctattcccagcgtgtcgagtacagcgtggaattcctccacgtccgcgtctcccaacgtggtgctgagcggacagtaccgcaaaaattctgcaaggtcgatatcgcgcggatcgtcgtaatgcgaggtgaaaaagcagctcaccggcgttgaggtcgtgtagcggtattcgcccgtcgtttcatccatcacatcggcctcagaggcaaacatctccttgaattcttcgatctgcgcctccgtcagcggcgcccaatcgtcctccggtccgccgtccgatttgtcatcattcgctcccgcgcagccaaacagtgccagtgcgcacacgcaggcgagcaaaaaggcaaataatttcttcatcgtttctctccttttcattttcgcatcatttgtttttactgccggcgcgccagctttgctcttataggttattcaccgtgccgaggaagagcggcagaccgtccacgccggtgatcatgaaagcaaacggccggttcagatccatctccaccacgggtaggtcttcgggcgcggcggattgggcgtccgccctgacggcggtaaacgcggtggcctcgcagcccttttcgtccaccttgacgcgcgcggcgtgctgcacctgcgtcacggcgacgctctcgtcgaacttctctttgtcgacgaggggcgagaagtctgccttgttgaagtcgaacacatccgtgacgcccatcgccttgagcgcgtcagtcagttcaagatcggagctgacgtcaaacttcggcacgctccagacgagcttgccgctcggcaggttcacccccatatcgtagatcatcaatccgccgacgacggtatcgtccgcaagaaggcgttcaagtgttgtcccctcgtcgggcagcaggaaacgcatcgactgcccgccgcggaagccgagctccgccacggtgtagttctcgccgcggtagtacgcggcgcggtcgtccgtgcggtgcatgaagtcgatggtctgcttctcgccgcttgctgcggtgaacgtgtccttcttcgtcgcattctcccagaattcatcgcgccactggtccttaaaatagagcgtcgtcaaaaggagcatcacggtctcgggctttgtctcgatctcgcccgccgcgtcctgcaagagattgcccgtgttctcattgatccattcgccgatagccttgtccgtcttctcatcccccatcggggcggagaaggtcgaggcgaggtactgctcggcgagaagtcgcagcgtctcttcgttgtaggggacgttctcgttcagccacacggagctgccgagcagcgtctttcccgtcgaggtctcgccgtagaggttacgccagacatagttgcccgcagcgcgcgacgcgtcggtattttcaaggcctaagagcgataaaagctgcgcgcggctgtcgccgtccgtcgtctcgctgagcatcgcaaaggcgagatacaggtttgcgggcgagagaacggtgttctcctccgccgaaagcagcgtgcccgtctcctgcgtgaagtgcaggaatgccgcggggtagctcgtgcccttgctgcgcagcgccttgagcgcatcgtaataggcattgctgcgcgcgtcccagtcctcccagatcttctcctgcgccttttcataggcgtccgcgcccatcttgtcatagtcgatggtgctgaatgcctcgtcaagctcactctcgttcggcatggcgggcagcacgggatagtccgccgtcttcacggcgaggtcctgcaaatactgcgcggcaatggggtcttttttcacattgtcctcctcattttcatttcggatcgtcgttccgttgtctccgcaggcggcgaaggacaggaccatcgccgcggcgagcagcagcgttaagaatcgtttcatgtcggatgtacctccgttttgggatttgttatattagacggcgcggatggaaaaaagttcccgttttgtcaaaaatagcatgccgcccttttacgaaacgggcgaatgtggtatactttcaaaaatattttctcttttgtgtaacgcaaacggcaaaaaagttgtcttttccccatgatggcagacaacagaaaggagcgagcctatggacgaccatgagatcgtcgacctatactggcagcgggacgagcacgccatcgaagccaccgccgccaaatacgaaagctattgcatgaaaatttcgcaaaacattttatccgaccgcgccgacagcgaggaaaacgtcaacgacacgtacttacacgcctggcaggccatgccgccgcaaaggcctgcgattctgtctgcctttctcggcaagatcgcgcgcaatctggcgctgaaccgctataatgcgaggtcggcgcagaagcggcagggcgacgccttcgcgctctcgctcgacgagctggacgactgcgcacccgccctgtcctcgcccgacgacgaggccacggcagcagagctcggccgcagcatcagcgcgtttctgcgcacgcagagcgaagaggtgcgcagcatgttcatcctgcgctatttctactgcgaaccggtcgaagcgctggccgcgcgctttcactgcggcgagagccgcatcaaaaccacgctcctgcgcacgcgcagaaagctcaaggagcatctcatcaaggagggatactgtgaagcatgaagttctgacccgcgccataggcgagctcgacgacgggctcatcgcggacgcctacgcctacaagccgcgcaaacggtacgccctcccgcgttttcttgccgctgcggcgtgccttgtgctcgtgctggccgccgccctggcgatgacgcgcgacgccttaccggctgagatcaaggtcgaaggcgcagcgctctcttccagggctatccccatcagccaggccaccccgatggcgctcgacgcgcgcggcagtctgagcggcccgctcagtccgatgctcaccatcgagagcaaatcgggcgaggccgtgaccgttacggtgtcggatggcgtgctgacccagcctctttactcgctgcaggaggagttcacctcctacaccgtctccggcaaggtgcagctttgctggaccatcgaagagccggacacgggtacggtttacacgctctctctcgacggcgcgcccgccgtcacgctgcgctacgacgaggccaacggctattgggccgccgcgcgggcgtaagcatcccattccacattactattgacaacacacaacattttggaggtaaattcccatgaaaaagtttctcaccctgctgctggccgcagcgatgactctctccctcgccgcctgcggcagcaagacggatgacaatagcggcaataacagccagcccgcgagcgctctcgagctgctgaacgccgtatgggccaactacagcgacgacgacaagttccctgctgccggcggcgactttgatgaggcgaatatgaccgaggacgcgcccggcaacttctccgtcgaagacggagatgcacttgactacgctctctccttccccgccgcggacgcaggcaagctctccgacgccgcgtccctcacccacatgatgaacgccaacaccttcaccgcgggcgcgttccacattgcgaatacccccgacgttgacgcggtcgtctccgacctcaaggacaacatcatgaaccgccagtggatgtgcggcttccccgacaagcttgtcatcctgacgctcggcgactatgtcatctcctgctacggcgcggaggacctcgtcgaccagttcagcggcaaggtcaccgaggcctttgccgatgctgccgtcgtctgcgacgaggccatcgcctgatttgatcttctgaaaggcggagaagtttatgctcttttccagcgttccctttctcttttactttctgcctgcggcgctgctgatctactttgcagcgccgcggcagctgaaaaacgcggtgctgctgctcgcaagcctctttttctatgcctggggcgagccgaaatatatgctgctcatgctcgtctccatcgtgcagggctatggtttcggcctgctgattgaaaagcaccgcgggcaaaaggcatcgaaggtctttctgacgctctcgatccttgtgagccttgggcttctcggctattttaagtacgcggacttttttctctccagcgtcaacgccgtcacagggttctccctgccgcttttgaagctgagcctgcccatcggcatcagcttctacacctttcaggtattgagctacgtcatcgacgtctaccgcggcgaaacggcggcgcagaggaatttcatcgacctcgccgcctatgtttcgctcttcccccaactcatcgcggggccgatcgtacggtattccgacgtcgccgcagagctcaaaagccgcacgcacagcgtctccgccgcggcggagggcgtgcgccgctttacggtcggctttgccaagaaaattctgctcgccaaccagttcggtgcgctcgcgagcgcctacaagtcgacgcaggacgcgagcgttctcttcgtctggctctacgcgctcgcgtttctgcttcaagtctatttcgacttttcgggctacagcgatatggccatcggcctcgggcggatgctgggcttccacttccctgaaaacttcaactacccctatatttcagcgagcatcacggagttctggcgcaggtggcacatgtcgcttggctcgtggttccgcgactacctctatatccctctcggcggcagccggaagggcaaggcgcgtcagctgttgaacattctgattgtctggctcgcaacgggcctgtggcacggggcggcgtggacgttcgtgctgtggggactgtggttcgcggtcctgctgcttcttgaaaagctggcgctgctgccggtgctcgaaaagcaccgcgtgctcggccatgtgtacacgctctttttcgtcacactcggcttcgtgcttttcgacgcagacagcgccgcgcaggcggtctcgcgcatcggcgcgatgtttggtgcaggcggtctgccgctatcgagcgcacaggcggtctactatcttaaaagctatggcccgttgctcgtgctcggtatcctctgcgcaacaccgctgccgaagatgatcgtcgcaaagctgcgcaaatccaaaggcgcagcgacggcgctcgacgtgctcgagccgctctgcgtgctcatccctctgctgttcggcacggcatttttagtggatgggtcgttcaacccgttcctctacttccgcttttaaggagggcatcgcatgaatcgaaaaatcaaagacgccctcaccctcggcatcgcggcagcgttcgtgcttatgttcgcgctgtggagcatttgcaagagcgacgacgccgtgtcggaaagcgagcgtcgcccgctcaagcagttcccaacgctgaatgtggaagaagtactctccggacgcttccagtcgaactttgagagctacacgctcgaccagttcccgctgcgcgacgagctccgcacgctcaaggccctgtccgtccgcgatttatttggcgagaaagacaacaacggcatctacgtcgcggacggctacgccgcgaagctcgacgacacgatccacgaggattcgctcgaccacgcggccgaccgcttccgctacgtgtacgaaacgtatctcaaagatacgggcgtaaacgtctacctctccgtcatccccgacaagaattactttttggccgccgaaaacggctatcccgcgatggattacgagaagttctttgcgctcatgcgccaaaaggtcgattttgcggactatatcgacctgacgggcacgctgtcgctctcatcctattaccgcaccgacctccactggcggcaggaaatgcttgcccccacggccaaggcgctggcagatgcgatgggcgtctcactcaccgtggactttaccgaggtcacgctcgatacgccgttttacggtgtgtaccgcgggcagtcggcactgccaatggagcccgacaggctcgcctacctcacaaacgatatcattggtagctgtcgcgtgtacgactatgaaagcggctcctatctccctgtctacacgctcgaaaaggcagacggcagcgacccgtatgaaattttcctctcgggacccaagtcgctgctgcgcattgagaacccgaacgcgcaggcggggcgcaagcttctcgtcttccgcgattcgtttgccgcgagtttgcttccgctgcttgcggaggggtacagcgagatcacgctcgtcgacatccgctacctctccccctcaatgctcggaaaattcatcgactttaccgcgcaggacgtgctgttcctttacagcacgagcgtgctgaacgacagcgccacgatcaagtgatgcaaaacgggacgcaaacgccgtgaccggcgttcacgtcccgttttcttttttgtccgcaaaattttttcacaacgcagcacataagcataatgccctcccctgccgtttccggcaagggagggttcaggctaaatatagcacagccgttttcttcatgcaagaaaaagttgccgcactttcataatttcgttcacaccgcacatcccgtctcactaaagtgaggggaaagttggaaaaacaaagtattgacgctgcttgccccgatgaagtatcattacttatcaaattttttatttcgaaacaggaggtctggatcatgagtgaagcgactcgcattcccgagctttttggctctctggtgttcaatgaacgcacaatggagcagtatgtgccgcagagcgccatggacgtttggcgcggctgcttaaagagcgggcagcctcttcccctttccgcggcaaatgagatcgccgacgcgatgaagacctgggcgctggagcatggcgcaacgcatttcacgcactggttccagcccttgagcggcgtgacggcggaaaagcacgacagctttatcaacaacgccggcggcggccgcgtgatgatggacttttccggcaaggagctggtgcgcggcgagcccgacgcgtcctccttccccaacggcggcctgcgcgccacgtttgaagcccgcggctacagcgcttgggaccccacggcgtttgccttcatcaaagatggcagcctttgcatcccgacggtgttctgctcctacagcggcgacgcgctcgacaagaagacgccgctgctgcgctccatggccgcggtcgaccgcgcggcggtgcgcgtgctcaagttatttggcgacgacgcggaaaaggtcacgccgcagatcggcgcggagcaggagtatttcctcatcgaccgcgagctgtacttaaagcgcatggacctgcgcctgtgtggccgcgccctgttcggcgcaaagcccccgaaaggtcaggagttggacgaccactacttcggcgcgttccgtccccgcgtggccgcctacatgaaagagctcgatgaagagctgtggaagctcggcgtgctctccaagaccaagcacaacgaggtcgcccccggccagcacgagatggcccccatctacaccgacgccaacaccgcgagcgaccagaaccagctcgtcatggagacgatgaaaaaggtcgccgagcgccacaaccttgtgtgcctgctgcacgaaaagcccttcgcgggcgtcaacggctcgggcaagcacgttaactggtcgctctcgaccgacactggcaaaaacctcttctcccccggcaagacgccgagccagaacgccgtgttcctgctggtgctcgccgcgttcatcaagggcgtggatgagtatcaggagcttctgcgctgctccgtcgccttcgcgggcaacgatcaccgtctcggcgcgcaggaagcgcccccggctgtcatctccgtctttctcggcaccgagcttgagggtatcatcgacgccatcgtcggtgaaaacgactacaccgcgcccgagcacaagtccctgcgcatcggcgtggacgtgctccccgccatcccgcaggatacgaccgaccgcaaccgcacctcgcccgtcgccttcaccggcaataagtttgagttccgcatgcccggctcctcgcagtccatcgcgggcccggtcacgatcctcaacaccatcatggccgaagagctcgacgaattctacgcgcagctcaaggacgcaccggacttcactgccgcgctccacaagctgatccgcgacacgttctccgcccaccgccgcatcatcttcaacggcaacggctatgaagaggcttggatcaaggaggctgaaaagcgcggccttgccaacctgcacaacaccgccgaggcgctgccgacctacatcctgcccaagaacattgagctgctgacgcgccagggcgtttacagcaaggaagaaattcactcccgccacgaagttcatatcgagaagtactgcaaggtcatccgcatcgaggccgcgacgctcgtcgatatggtccagcacggcatcctcaacgccgcttccgagtacgaagccgcgctgtgcggcaccatcgccgccaagcgctccgccgcgccggagctgacctgccacgtcgaatcctcgcttgccaacgccatcggctcgctcaacgagcagctgctcgaagagaccatcagcctcaagacggcgcttgagaccgtctccgacaacgctgagcccgaaacgctcctgcgctactaccacgacgaggtcgaagagcgcacgaacgacgtgcgcaagaccgtcgacaagctggaagtgctgaccgcgtccaagtattggccgtatccgacgttctgcgaattactcttctccgtgtaaaagtcaaaaggacgctctttcgagcgtcctttttgaagtggagttttgctttatcgcagcagtttcatttttctttgacaggggaggaagaaaaatctatgaagtacatttttgtcaccggcggcgtggtgtcggggcttggcaagggcatctgcgcggcgtcgctcggtcggctcttaaaacagtgcgggctgaaggtcaaaaaccagaagtttgacccgtatctcaacgtcgaccccggcacgatgagcccgtatcagcacggcgaggtctttgtcacggacgacggcgcggagaccgacctggacctcggccactacgagcgctttgtcgacgaggcgctggacgagaaatcctccgtgtcctcgggcaaaatcttctggagcgttctgaaccgcgagcgtcagggcggttatcttggcggcacggtgcagatcatcccgcacgtgaccgacgagatcaagcgccgcatctacgacatggacgacggcgagaccgacgttgccatctccgagatcggcggcacggtcggcgacatcgagagtcagccctttttagaggccatccgtcaggtcgcggccgagcgcgggcgcgaaaatgtactcttcatccatgtgccgctcatcgtgaccattcccggcagtggcgagctcaagagcaagcccacgcagcactcggtcaaggagctcctgagcgagggcatccagccggacgttctcgtcgtgcgcacggatgagcccatcacagacgacatccgccgcaagatcgcgctcttctgcaacgtggagcccgactgcgtcatccagaacgcaacggcgtccacgctctacgaggtgccgttgctgcttgagcacgagggcctttgccgcgtggtgtgccgcaagctgcaccttgactgcggtgaacctgacatgaccgagtggcgcgcgctggtcgacaagatccacggcgtgcaccgccacgtgcgcatcgcgctcgtcggcaaatacgtcggcctgcacgacgcctatttgagcgtcgttgagtctctcttccacgcgggcacggcctgcgacgcgagcgtcgaaattcaatgggtcgactccgaaacgctgacgagcgacaacatcgcgcagaagctctgcgggtgcagcggcatcttagtccccggcggctttggcgaccgcggcatcgagggcatgatcctggccgcccagtacgcgcgcgagcgcggcatcccataccttggcatctgcctcggcatgcagatcgcagtcatcgaatttgcgcgccatgtgctcggctgggacgacgcgacgagcgcggagttctcctccacgacggcgcatcccgtcatcgcgctcatgcccgagcaggtcggcgtgacagccaagggcggcacgatgcgccttggcaagtatccctgcgtgctcgaagagggttcgctctcccgcgcgctctacgacgcgcccgagatctgggagcgccaccgccaccgctacgagttcaacaatgacttccgcgacgacttcacggacgccggcatgcgccttgccggtctctcccccgacggcacgctcgtcgagatcgtcgaatcgaagagccacccctggttcgtcggcgcgcagttccaccccgaattcaagagccgccccaacaagccgcatcccctgttccgcggctttgtcgcggcctccctcgatcgcgcggtccattgaccgcgcgacctttttatttttacaataccgctggtaaaatgggaaaagctatgatatgatgcttttaccatattattggatacggcaggagaatttcaatatgaaccatcagaccatcatcgtactggactttggcggccagtacaaccagctcattgcgcgccgcgtgcgcgaatgcggcgtttactgcgaggtcaagccctacacgacgccgcttgcagaccttctcgcgatgaatcccatcggcttcatcttcaccggcggcccgaacagcgtgtatctcgaggacgcgccgcacgtcgatcccgcgctctttgacgcgggcgtgcccgtgctcggcatctgctacggctgccagctcatcgcgcaccacctcggcggcaaggtcgtcgccgcaaacgacgccaccgcgcgcgaatacggcaagaccgagacgttttttgacacgagctgcaagctcttcaagggtcttcccgaaaagagcgtgacgtggatgagtcacggcgactacatggaggtcgttcccgagggcttctctctcgtcgcgcactccgacgcctgcccgaacgtcgccatctgcgacgaaacgcgcgggttctacggcgtgcagtaccatcccgaggtcaaccacacggagttcggcaccgcgatgatccgcaacttcctctacgaggtctgcgacgcgacaggcgactggacgatgggcgactataaaaatactgccatcgccgccgtgcgcgaaaaggtcggctccggccgcgtgctgctggcgctctccggcggcgtggactcgtccgtcgtggcggcgctgctggccgaggccgtcggcccccagctcacctgcgtttttgtcgaccacggcctcatgcgcctcaacgagggcgacgaggtcgaggcggcgttcaagaagtgggatatcaactttgtccgcgtgaacgccgagggccgcttcctctcgaagctcgctggtatctccgatcccgagcgcaagcgcaagatcatcggcgaagagttcatccgcgtgttcgaggaagagtcgaagaagatcggcgcggtcgactttctcgctcagggtacgatctaccccgacgtcatcgaatccggccttggcaatgccgcagtcatcaagagccaccacaacgtcgggggactgcctgactatgtcgacttcaaggagatcatcgagccgctgcgcctgctctttaaggacgaagtgcgtcagctcggccgcgagctggggcttcccgaatacctcgtctcccgccagccgttccccggcccgggccttgccatccgcatcatgggcgagatcacgaaggaaaaggccgacacgctgcgccttgccgacgcgatctaccgcgaggagcttgaaaaagcgggcgaaaacaagaagatgaaccagtacttcgccgtcctgaccgacacgcgcaccgtcggtgtcatgggcgatggccgcagctacgaccgcgtgcttgcgctgcgcgccgtgacgaccgaggacttcatgaccgccgactgggcccgcatcccctacgagctgctcgacaagatcagcggccgcatcgtcaacgaggtcaagggcatcaacagaattgtctacgacatcaccagcaagccccccgcaacggtggagtgggaatgagaaaaaagtgaatatgaggggctgaaaagccttgaaaacactcactttttgaaaatctcatttcctgtttgatagcaaaatgatagcagataccaaagccattttgtttgttcttgttttggcgagcgaatggtttgcaggtttgctgtcgcatccaatcctatattgagagcgaaaaaggctctgctgactttctgtaaaagaaggtcggcagagccttttgttattcttcgctatgttccttgagatcagcaaggagcaggtcactcagctcctgcgacggcgtgatcttgtgccactgaccggaggtgtcaagttcagggtagcggtagcgccagcggtcatattcttctttggtgatctcccccgctttcagcttggcggcaatcgcaccccatgcggaaagcatcctgtgaagctccgctgcgtcgcgtcctttgtggctattcctgtattgccgtttcgctctacgaccgctacaatgatgatcactacgccatcaccctttcttcgctcaagtcgctgatgaccgatgagcacatccagcagctcctgcctctgctctttgaaacgcgcgatctcatccagaaagatatcggcctttgattttctctccctccacgactaaaaaagcgacatcccgaattcgggatgtcgctttttctgatcaatttttatatggtatgttttccggcaaaggatatcctgtcttacggattgaccacattgacaggagcacccgcaaggaacgccctgatattttccgccgtagcatccatgatacgctggcggctctccttcggtgcccaggagatgtgcggcgtgatgatgcagtttttcgccttcagcagcgggttgtctgcgcggatcggctcggtgtagaccacatccagtcccgccgcggctattttgccgcagttgagcgcgtcggcaacgtcctgctcatcgatgagctggccgcgggcattgttgatgagaatgacgccgtccttcattttggcaatgctctccttgttgatcatgccggtgttttccggtgtgagattgcagtgcagcgtgataacatccgcgcaggcataaagttcatcaaggccgacgtactctgcgatctcgcggccggagtcgttcggaaaaaggtcataggccagcacattcatgccgagcgccttggcgatgcgcccctccgcctgcccgatgcggccaaagccgatgataccgatcgtcttgccctccagttcgataaggggatagtcccagtagcaccagtcggcgttgttcgcccaattaccggcgtgcacgctctcgctgtgatgaccgatatggtggcagatctccagcagcagcgcaatagagaactggctgaccgacgccgtgccgtaggtcggcacgttcacgacggggatgcccttttcgcgggcatagttgtaatcgaccacgttgtagcccgtagccagaacggcaatgagcttaatgttcgggcacttgtcgatcgtttcgcgcgagatgggcgtcttgttcatcaccacgatttccgcatcaccgatgcgctcggcgatcagcggagactccgcgtaggccgtgcggtcataggccgtcacgctgccgagcttttccagctcactccagctcagatcaccgggattttccgtatatccgtccagtactacaattttcatgtttgttccccctcctgtcggcttcttatcttcgcctgccgcattattttataatcgacatacagttctgtatggcgcagcgcttcaacataagcctccgcaagtcgtgcttgtgcagagtacaacgcatgtattcgtatgcttcaagcactaaatagtcatttcagcatattcactacatctcttcaccgcagcatctgaacagaacactcgttcagaggagaacatactcttctcagtgttgtgcctcccccgcgatcacttccgctgcgatctccagtgctttggtcatcagcgcaagactcatgctcggcgcattgccgtcctttgcctgctcgggcaggtaggggacgtggacaaagccgcagcgcagggcgggatagctctgcgcgctctcgtgcagggcgcagtaaaggagattgttgcacacgaacgtgcccgcggagtacgagagctgagcgggaatcccctgctcatgcagggcgtcgacgatctcgcgcgtcgggatcgtcgcaaaataggcgtccggacctccggccacgaccggctcgtccgtcggctgcttacccgcgttgtcggcgatacgcgcgtcgcgcaggttgatggccacgcgctcgacgcgtatgcaatttgcgccgccgtactggccgatgcagagcaccgcgtcgggccgcagctccgtcaaaagtttgtgcagcgcagcaccggaggcgtcaaactccgtcggaatttcatgcttgatgagctctgctcccccgatgcggtcgggaagccggcgtgccgcctcccacgaggggttgatctgctccccgccgaacggcgtgaagcctgtgacaagtatcttcatttgacagtttcctccccgatcatcaggcggatgatctcgttgtcggtctcgcgcatgccgtcgcgcgcgatgctgctgacggcgcggatggtgttctccacacccttgacgacgatgccgtcgccgccgtagaactggctgtcgtgccggtacatctgcatgccgagaagccccgcctcgaccgccgaggcgatcttcgccgcgcagctcgccttcgccccgtcacagagcatgccggagttgatggcgagcgcgttgacgaccgtgtgggcgatctcatcatagcgcccgccgtacagatagcagatgccggccccggctcctgcgcccgcgctggtcgcgccgcagtaggcggaaaggctgccgatgcccgttttcagatggatggtgacaagattcgacacgacgagcgcgcggtagagctgctcctcgctcgctttcagctcgcgcgcgtagacaatgacgggcagcgaagccgtcatgccctgattgccgctgccagagttaatgacgacaggcttttcgcagccgttcatgcgcgcgtccgagcccgcggcagcccacgccttggcgcggttctgcacgctgtcgccataggaatcgagcaagatttttccgatggccgcgccgtactgccctgtcaatcctgcctcagcgatggccgtgttatattcgatctggcgcgcgatgggcgcgcggacgtcgtctaaatcgacctcgtcggcaaaggcgataatgtcctcgaccgtcaggctcctgcggctctcgggcggctgggccgcctcctcggaaaagggcttgttgagcagcacttcgccgtttttctcgatgcgcacgacgtttgtgtggctgccgacgatctggacgaaggccgtatccccgcctgcgaaaacacgcacctgaatgtcgaacgggcagctcagcggcgacttgctcaccgtgatctccgccgcggaaaggtactcgtccagcagcggaagctgctcctccgtcacgtttgccaacacctctaactgcgcgccggcatcgccgacgcgtactcccgccgcgaccgcgacgggaaggccctttcgcccgccggtgtgcggcacgataacgctcttgacgtttttgatgatattgccgctcacggtcagctcgatgcgctcgggaagtatcccgagcgtttggcgcgcaagcgcacccgcgtaggcaacggcgatgggctcagtgcagcccatcgcgggtacaagctcctcatgcaaaatctgaacgtaggtctcatacagcgcagtattcatttttgctctcccatctctcattgcgggcgtgcggtctctcctccgctcgttacccgcttctctctccgcccattgtatcggaaatacggttacaatgcaatggactttccacgtttcacgcacaaaaaggcgatatccggtcggataccgcctttttgatgctattccactcttacaaaccgtaaatttcgccgtacttctcctcaaggtactgcgtgtagaccgtcgggtcgaacttttcaccaagcgcctgctccaagagtgcgccgggctttttgaggcagccgtactgccagatgtgctcgcggttccacgcattgatgggcgcaaaattgccggtcttgaggcactcgtccacatcgatcgtctctctcatcttgcgaagcagctgcgcgccgtaggcgctgccgagcgcgtaggacgggaagtagccgatgctgccgcccgaccaatggctgtcctgcaaaacgccgtgcttgtcgtccggcacgtcgacgccgaggtattccttgtaaaggcggttccactcgcccggcaggtcgtgtaccttgagctcgccgtgcatcacgcgcttttcaagctcgtagcgcaccatgacgtgcaggctgtaggtgacctcgtcggcctcggtgcggatgagggacggctccgccttgttgatggcgcggtagaattcctccgccgtgtggccgctcagctcggggaacaactcgcagagcttcgggaacacgaagcccgtgaaggcgcgcgagcggccgagcaggttttcatagaaacggctctggctctcgtggatgcccatggagacaccgccgtcgagcaccgtataggcgagatcatccgcgctgccggtgtcatagagcgcgtggccgccctcgtggataacggagaacatcgaggaggcaaaattctcctccaaatagtgcgtcgtgatacgctcgtcaaagtgcgagccgagcgacgtcgtaaacggatgctcggtcgtggacaggccgacatggtccaaatcgaggcccatcgtgcgcatcaggtagtcggaaagctgcgcctgcttctcctcgggaaaatggccgtgcagcatcgcgtcatcgagctgcggctgcgccttgatcttcttcaggagcggcacaatgtgctcgcgcagcgtcgcgaaaaattcgtcgcactgcgccatcgtcagcccgtcctcatactcgctgagccagtagtcataggggtccttttccggcgcgcagtagtgcgcgaagcggatgttggtctcgaaaattttctcaagcacgggctcgaagagagcaaagtcgctcgtctccttcgcgcggtgccagacgtcgtccgcctcgaccaaaagctgctggtaggcgacgtactcgtccatcgggatcttctgcatattgcggatgtccttgatgagcaaaaacaccatgcgctgctgcttttcgtcgagctcagatttgcgcgcgtcgaggaattcgagcagcgcgacggtctcttcaccggtcgtgagcttgtagtgctcctcgctcaaaatactcatggtctggccgcggttcgccgccgtgcccttgggcgcggtggtcgcgccgtcgtaaaagagcaggcccatggcgtggccgtaggccgcgagcttggcctgcaaagccatcagggacttgatcgcttcatcgagagtcatgatgatctcctcactttctctttttctgtgaaaatatcatagcatgaaaggggcttgctgcgcaagggggacgctgaggttctccccctgtggccgcgcagggacgcagaaaaagagggggcattctctcgcgtgagagaatgcccccttgtacccccccaagagaacgcgaggggagttccccccgacccccgacattggcagtttgcagtttgaagatctgcgcagcctgcggaatcgaatgcctgccaagtgtgggtgctatacgatttgagttgcttctattacccgctgccgctctgcctgtatgagcgaaaaattcatcatttcactattttttctctcacggtttcgcaagcatctgcactgacgaccccctgttctttcagcagtgccagcactgaagcaagcgcatcctgcggatcacaccagatatccggagcatagcccctgtgatcgacattttctccgtccccatagaggaaaagcgttgccccaaagcgcacaccgatgccggtatacggcaatgtaaaggtgctgatatttccgcagagctggtatcccgccgtgttgctgccgacaatgagcacattgtcaagcgttttcaaaagctgtaccgcgccctcgccggacgagccgcaatgatcgtcaaccaacacgatgatcggaatatcattttcataccaggtcccgtggacttcacgggcaaagcaagttccctcatcttccggcagcagactctcgctgttttccgcagcaaaaagggcgctgtttttctgcgcatacagcatggaggtctcaatactgttctgcgttccgaggaaactctgtatccactttctcggccaactatccgagccgccaacattgccgcgcaggtcatagatcaccgctttgctcccgcgtgctttttccccttcccgagcatagcgtgcaagcatattatcatatgtgccggaaacaaagctgcggagggaaacataggtaagaccgtcttcctgtatcaggcggtaatccagcgtgccgaggtcaacatcaagcggctgactctccgtccagtcaaggcgatagattttcgcttttccagaagaatttttcagtgtgacactgctctgcacggcgtccttccgcagcgcaaaaagcgtcggctgataaacaatgcgtccgtcttgcagaagcgtcggctgcacgctgacatgttcatcggagaagctactcaatgtccacctctccccgtcattcactatataatagctgccgttgacatcctttgaaaaatagaagccgtcggcaaagaagtattcatatcgcacctgcgcctcgatctcttccgccgccggttcataaatcacggcatgcgcgtcgtgcgcaagcatgaatgcgagagattcctgcagtttttctcccagcgcagaaactttaatctcatcatcctgtgaggaaagccattgtgtcacagcgtcctccgctgcgtcaaacttttcctgcccaaagtattcgtaagcgccgtaagcgctttgcagcgcgcggaacagcagggaaacatcagactgcgcctgttccttcgacaccgtctccatcgcggcatgacctcgtaaaaggctctccacctcgctctcgctcagcagccctgccgaggcggggtcatccgaaatcgcatcggcaaaatcagccgcagagggaacgtgctccagttctgcacggtgagtttgtgaagtctccaccatcaaagaagaaagttcttctccttccggagcgtaggaaaagtccaacgtctgcggtgcgccgcaggctgacaaaagcagcagcaaaactattgtgctgcatatagcaaatctttttttcacaaattatccccctatggaaagtgtgaaggtatcatagcaaattaaaaacctgttttcaatcattgacagggaacgttcttataaaaaacaggacactcagttcggatgtcccgtatctatttggcctaccgaagcaaaaaacaacgcttttgcgccatacaagcgttttgcgcagcaaaaccttggcagagggcgaattcacttcgcccgagcattttaatttcctgccggaatccaaaaaatcggcgcttttgcgccgtacaagcgttttgcgcagcaaaaccttggcggagggcgaattcacttcgcccgagcatttcaatttcctgccggaatccaaaaaagaggtcacaacatacgttgtgacctcttttttggagcgggcgacgaggctcgaactcgctacctccaccttggcaaggtggcgctctaccagatgagctacgcccgcggaacaagatgtactataccagacatttttcgctttgtcaagcatagattttaggattctgttgcaaaatgtggggggctgtgatacacttgcccggtaaatcgtatttttcaggaggcagtcatggccactttacaggaagagatctcccgccgccggacgtttgcgatcatttcgcacccggacgccggtaaaaccacgctgacggaaaagtttctgctctacggcggagccatcgcgcaggcgggtgaagtcaagggcaagcgcgagcgcgcggcaaaatccgactggatggaaatcgaaaagcagcgcggcatttccgtcacgtcgtccgtcatgcagtttcagcacggcggctactgcatcaacatcctcgacacgccgggacatcaggacttctccgaggacacctaccgcacgctgatggccgcggacagcgccgtcatggtcattgacggcgcgaagggcgtcgagccgcagacgcgcaagctcttcaaggtctgcgccctgcgcaatatccctatctttacctttatcaataaaatggaccgcgagacgcgcgacccgctcgagctctgcgaggaggtcgagcgcgagctgggcatcgacacctatcccgtcaactggccgatcggctgcggcaaggagtttgccggtgtgtacgaccgcgataagcgctgcatcctgcacttcaccgacgcgggccacgccaaaaaggcgggcatcacggaaatcgagctcgacgatcccgcgctcgtcgacctgatcggtcaggcccgccgcgatacgctcgccgaagaggtcgagctgctcggcgcgggccgcgattttgacctcgacgccgtgcgccacggtaagctctcccccgtgttcttcggcagcgcgctgacgaacttcggcgtcgagccgtttttgaacgcgtttttagagatgaccacgccgccgctgccgcgtgtgagcgacgcgggcgaggtggacgtctactcccctgaattctcggctttcgtcttcaagatccaggccaatatgaacaaggcccaccgtgaccgccttgccttcatgcgcatctgctcgggcaagtttgagcgtgacaccgagtatttccacgtccagtccggccgcaagatgcgcctttctcagccgcagacgatgatggccgccgagcgcgagatcgtcgacgaggcctatgctggcgacatcatcggcgtgttcgatcccggcatcttctcgatcggcgacacgatcacgaggcccggcaaaaagttccgcttctccggcatcccgacgttcgagcccgagcacttcatgctcgtctcacccaaggacacgatgaagcgcaagcagttcgtcaagggcgtggagcagatcgcgcaggagggcgccatccagatcttcaaaatccccgacagcggctttgaggacgtggtcgtcggcgtggtcggcacgctgcagttcgacgtgttcgagtaccgcatgaaaaacgagtacggcgtcgacctgcgcatgagcggccttccctacgagcacctgcgcctgatccgcgagtgcccgtgcgacgtgaaggacctgatgctctgctccggctcgcgcgtgctcgaggacttcaagggccgcaagctcatcgccttcggcggcgagtggagcgtgggctttctcaccaagcacaacgagggtcttatcctcgacgactggctcagcgtgtaacagataacacctataatataaggagagacgcggctttcgccgcgtctctttcgttataaaagcatcgcagactttgccgcccgcaggcggcaaatgatctggatcgttttttctggcgacacgcgcgtcagaaaagacactctgcgcggagcgtgtgtcgagcccgcgaggcacaaagcgaagcgaaactttctcaaaaaaagtggtgacaccacttttttgaatgatcttacgcgttgtaaacgtcctcgttcagcacgccctcggacttggcgacatagatgctcgtggcggaatcgccgacaacattgagcgcggtgacgagcatctcgatggggcggttgatggcgaggatgaggctgtaggccagcattgccgcatcattcacatagccgaggccggagaggatggtgaaaaggatgatcgcgccggagccaggggccgcgggcgtaccggcggaggcgatgagtgcgagcagcgcgatgacgacgagctgggtgaagctgatgctgtagcccgcgcagccggcgatgaagagcgttgcgatgacctgcatgatggccgttccgttcatgttgatggtcatgccgagcggcaggacgaaggaggcgatcttctcatccacgccgagctcctcgaccgtggtcttgacgttgagcgggagcgtcgccgcactcgaagaggtggagaagccgaagaccgcgacgcgggtgatcttcttggcgaacttgaaaggatcaagatgcgcgaagatcgcgatgaaagcgggatagccgatgatgaggaagatgagcagcagcgcgaccgtgaggataacgtaggcgacagctggcttgaggtgctccacaccgtaggatgcgaaggtgcgcgtgagcagcatgaagatagcgacggggccgaacttgctgaccacgaagttgaggaagacgatgaccacgtcgttgagttcctgaatgagcttgcgaagcgtggcagtcttctcctcgccgagcgtcttcatgcaaaggcccagcgcgatggcgaggaagacgacggcgagcactgccgtgttgctcgaaaacgtcgaggcaatgttcgaggggatgacgttcagcacaacgagcagcggattggagcccgtcgaaccggaaacgctctccagcccgtcgacggcgatgtggaatacgcccatgttatagaagacgatgccgcagacgcaggcgagcaggagcgcaaaaaaagaacagatcaggaaacccttgatacacttgaaggaaattctgccaagtgtactggtatcagagatctgtcctattgccaatgtaatggaagtaaacaccatcggcacgatgacgagctggagggaacgaatgaacatctgaccggccaaatagaaaaggccaagcgcgctgctcgctccggcagcggtgatatcctggaataaaagattattgatggtcgcccacaccgcttcctgtccggaggcattcaaatgctcgcggaggaacaaaaacaggagaccggccgtcagtcccgcaaccagggagatggccattttcgttgccagtgttttctctttccttactttcatgtgtcgtatcctttcttttcccgtgcccgcctgccccattttgaggcccgcgtttgcgatttttacgagcatactacgcggcgccgcaattggcaagtggcgtttccgctaaatatgaacgaattttgaacgcgttctgcgttggtattgacaaaattccaatttttttcgaaaaaataaagaaaccgctaaattatctgttgacaaatgtcgaacggaggcatatgatgcacatgtaaaaaaagagtaggtgcagccgcttcgaccgcatctcaaacgataatagcaaacccggtgaaaaccggcgacgcaaagctatagggccttacccctgggaacagggctggcagccagttaccgaaaggagatcgccgtatgaaacggctgtttcgtcatgcctgcgctatgctcgcagtgcttattgtcatgtccatgttcacggttgtgaacgccagcgctgccaatggcaccaccattgacaccacgaatgccaagtatggtttcgtcaccgtcaactacacctccaatgccaaattgaaggtcggcatccagtacggcaacgaaaagacgtcttacaaaaactgcccgagcggcaaggacgccgtcttctccctcgagcagggcgacggcacctacaccatctccctctgcgagaacatctccggcacgacctaccgcgtcgtgaccagcaagcgcgtcaacgccaagatcgaaaacgcctacgccccttacctcatcgccacgaccgacgtgcagttcacctccggcgacgacgtgtgcaagaaggctgccgcgctctgcaaggacgccaagaccgacatggacaaggtcaccgcgatctacaactacatcgccggtcactacacctacgacaccaagctcgcgagcgacatcacctccggcaaggtcagcaagtacatccccgacaccgccgccaccctgaacagcgacaagggcatctgctacgacctcgcgtccctcttcgccgccatgtgccgcagccagaatatcccctgcaccctcaccaagggctacgccggcagcagctaccacgcctggaacaaggtcaacgtcagcggcaactggtaccagatcgacatgacctacgccgtcaccaagcgcgtcatcaacgagaccaccttcgccggctgcgtctcccccctgacctactcccagcagagcgacgcgctcgccgtgtccgcggtggcgtaagacctcacaattcgtcgaatcacggcggcaggtattccttgccgccgtttttttctgcgcggtattagttctgttaatatcttatatattttttgaaaatcgccttgcatttttgggcaaatctggtatactgtgaacataaaatattggcaaacacaaatatctgtgcggctcgcagaagagcaactgtacagaaaaaggcacagcaggcgaaagcctgtgtcgcaaagccacggacctaaacggcgcttgcgccgcacggcagccggttgccaaatgcagatcacctccccccttcttcgcgccgtacaggcagaagaaggaggatttttttatgtctgagaagaaagttggcaagcgccttctcacctgggtcctggtcctcgtgatgacgctgtcgctattgccgctcaacgtgctggcggaagagacagcgtcgagtggcaacgtgaaatacggtacgattgacaaggatggcaagtggactgcaactgagaatggtaccggcacaaataatatcaccggtattacgggtgtgaagtccgtcagcaagaccgctaagcgtgtcggcgacaacacctatgaggtcacgctcaaagtcgagctggaacagacaacatcgaccacgctgcccggcgccgccgcgactgtgctggtgatggatcattctggttctatgaatggctgcgcgtcctgcaagagtaccatgagtgatagccttttcgataactcatattaccatgatagcacctgcgtccactataaggcctatcaaaataatgtaaccaatgcgcagagccggatggccgcagctacgaaggcagccctgagttttatcacgacctatagcgggcgttttgataagaacggcaaagagacgacaacggataatctgaaccttggtcgctgggtgtgccttgtctggttcaatgagactggcggtgtggttggtggccgcgaatggctcgatgtatccaataaggatgcatatcagaaggcaactgacacatccaagtggaaggctgagaaagctacaaaccttgattgcggtctgaagttcgcagacgatcagctgaagcaggatacagtcaaaaatattgacaaatccttaaagaacgttgttgtccttaccgatggcaagccgacatattatctccaagattggagctatagcttttttaatccgtctcctgatatcacgattgggggaaacaagtacgatgtcgcaggtgatggctcgagctgcgacaaggatactttccaaaataccaagaattccgcaacggacttaaagaatagcgcatcggtctacaccgtctgctttggtgcaagcggagagaagattacgaattacgatgataaaaccggcacagatttcttggggcgtccgatatactcgaaaatttcggtcggcgactatctgaaaaacaagatcgccacatcgccgacgagcggcaagatttacgcctacgatgccgacaacactgagggtctgatggccgcttttacggcgatcaccgacaccatcgtcagcggtctgaacagcggtactgtgaccgacaggctccctgccggtgtgacatttaagaacggcacccccgatggtttcacttctacctctgaaaacggtgtatataagtgggaactctctggtgcagcaggaacgggagaaaacggcaagaccgtttacacctatacaaagacctacaccgtcaccatcgatcccgagaccgctgaggctgatgaggacggctacgtgcccctgaacggcaagaccacactgacggtcgagggcgcttcggttgacttccccatccccgcaggcaaggtcacgcccaagacgatgacgcttaccgctacggactataccggcaagtatgacggcggcgcgcacggcggcgaaataacgaattccgacggcgcaacgctgacctaccagaccaaggataaggacggtgactggacaactgcaacgtctacagtaccgactctcacgaacgttggcaagattgatgtcaaggtcacggctgagaagaagggctatgagacagaatctgccgagtacaccattgaggtcaccaagcgcgatgtgaccctgacctccgccagcgacgagaaggtttacgacggcgatcccctgaccaagcatgaggtcaccgttggcggcgacggttttgttaagggcgagggcgcgacgtataccgtcaccggcacggcgacggatgtcagtaccgaacctgcaaaaaacacttttgagtatacactgaacactggtacaaatgcggccaactataacatcaacaaggttgaaggcacgctgacgatcacgcctaaacaggtgacgatcaaggtcaacgatgcgggaaagttctttggtgatgacgatcccgcgttcaccggcacggttcctccggatttgattaacgcgggcgaccttggcgagatcacttacgttcgcacgaacaaggatgttgaagctgttggcacctatccggacgtgctggatgcccagtacactaataataccaattacgatgttatcgtagagaaaggcgactttgagatcaagaccgcgaccagcggcgctcttctgaccgctcagggcggcgagtggacgtatgacggtaaccctcataccgctatggccagcgtaagcggtgctgacggctacaccatttactacaaggtcggcgatgctgattggactactgatgctcccagcgtaactgatgttactgaaggtcttgtgactgtaagcgtcaaggcaactaaagtcggttataccgatctgacttgcgataatgttacacttaagatcaacccgaaagctgtgaccatcactgtcgctgacaaatcgaagatagtaggcgaaaatgatcctgagtttaccggcacggtggctggattggtcgatgaaaacgaccttggcacgatcacttacgttcgcacgaacacgggtgttgaaactgccggcatctatagcaacgtgctggatgcccagtataccgagaatagcaactacactgttaaagtaatgaagggcgactttaccatcacggagaagcagcccaccaccaagtatgcggatgttgaagttcggtactataaggattccgtcgaagagaataatcgcctgaatgagacgccctttgtcatgaagaatcaggttgtcggcgatcagattgaccttggtttcccgctgattaacgcataccagcccgatggctacaagccaggcgtccaagtgggcagcacctacacagtcattgagggtgagaacgtcatcaaggtcctctacaccaagctcggcacgatccagctcggcgattttatcttcaagaactttgagagcagatacggcgcgagcaccgaagagaccttccgtgcttatgcaacggtgatgccttacttcgtctatgcgcctgagcagcccgccgagcctgagcagcccgccgagcctgagcagcccgccgcgcccgagcagcccgctgcgcctgaacagcccgctgcgcctgaacagcccgctgcgcctgagcagcccgctgcgcctgagcagcctgctgcgcctgagcagtccgctgcgcctgagcagcccgctgcgcctgagcagcagcctgtcattgaggtcagcgatagcttaactctggacgatggtctggttcaatgcgaaggttctgtcacactgaagactggttactcggattcgtttaagtttgaggaaatttccctgcccgcaggcacataccgcgttgaagtgtacgagggtaacggcaaggacgatgatatcgtttacgacgatacgacatattcctttaccttgacggtggtagaaaaagatggcggtactgttgccagcgcaagtaattttgcattccgtgcggaaggtaatggtgaatttgttccgatggagaatgcaacgaaggttgagtttaccaacgagtacacctatcgccgtccgcatcatccccgtcccaagcccaccgtggagatcgaagacgatgacgcgctcggtctgaacacgaccgaccacttcgcctatatcgtcggttacggcaacggcgaggtccgcccgcagaacaacatcacccgcgccgaggttgcgaccatcttcttccgcctgctgaccgacgacgtccgcgacgagaacctgaccaagaccaaccgctactccgatgtggccgctacctcctggtacaacaccgcggtctcgaccctcagctccatgggcatcatcacgggctaccccgacggcacgttccgcccgaacgccgccatcacccgcgctgagttcgccgccatcgccgcccgcttcgacaacgacggcgacaagaccgctgcgaagttcagcgatatcgcgacccactgggccaaggatgagatcagcatcgcctacaacaacggctggatcaccggctatcccaacggcaccttcggcccccagcgcgacatcacccgtgccgagaccatgacgcttgtcaaccgcgtgctgaaccgccagcccgagaccgaggacgatctcctcccgaacatgacggtctggacggacaacgcaaacccgaaggcctggtactacctcgccgtccaggaagcgacgaacagccactactacgagttcaagacgaactcccagtatgaaaagtggaccgagctgcgcgagacgcgcgactggacgcagctggaaaagtaagtcaaaaatcctccaccccctattgtaaaaggaagaaccgctcgcaagagcggttcttccttttttgcactcccctcgcgatctcaaaatccattgacaaagcgaacgttcctgtgtatcatatcaacatacttataagataggatttatctcaatgaccactatttacgcggacaacgccgcgacgacccagatgagccgcgccgcgatcgacgccatgctcccctatctggagacgatctacggcaacccctcaagcctgcattccgtcggccagcaggcggccggggcgctgctcagcgcgcgcgaccgcatcgcaaaatgcctgaacgcctccccgcgcgaaatttacttcacctccggcggcagcgaggccgacaatcaggccatcctctccgccgctcgcctcggcgaacgcaagggcaaaaagcacatcatttcgaccgcgttcgagcaccacgccgtgctgcacacgctccaaaagctcgaaaaagagggcttcgaggtcgaactgctccccgttggccccatcggcaccgtgacggcgcagcaggtcaagcgcgccatccgcgaggatacgtgcctggtttccgtcatgtacgccaacaacgagatcggctccatcctgccggtcggtgcgatcggcgcagtctgccgcgaggcgggcgtgctgttccacaccgatgccgtgcaggccgcggggcatctgcccatcgacgtcaagtcgcagaacatcgacctgctgtcgctctccgcgcacaagttccacggcccgaagggcgccggcgtgctgtacgcccgccagggcatcgccttgacgagcctcatcgagggcggcgcgcaggagcgcggcaagcgcgccggcacggagaatattcccgccatcatgggcatggccgcagccttcgaagacgcctgcgcacacattgacgagaatgcaaaaaaggtcagcgccctgcgcgaccgcctgatcgacggcctgtccaagatcccgcacagcgcgctcaacggcgatcccgtgaatcgcctgcccggcaacgtaagcttctgcttcgagggcgtcgagggcgagagcctgctgcttctgctcgacgcaaagggcatctgcgcgtcgtccggcagcgcgtgcacatccggctcgcttgacccaagccacgtactgctggccatcggccgcgtgcacgacgtggcacgcggctcgctgcgcctgagcctgtgcgagtggaacaccgacgaggaagtcgaccgcatcctcgaagccgtgcccgaggtcgtggaatacttacgcggcatgtccccgctgtggaaggacctcgtcagcggcaaaaagccgttcactttataagcacgcggcaaaataaggcaaaacgataagcgcggcatcgcttctcacagggacattccctgcgccaaagcgtgccgcatgatgtgaggaaatatggataaggtgctcattgcgatgagcggcggtgtggactcaagcgtcgccgcatttttgatgaaggagcagggctgcgagtgcatcggcgcgacgatgaagctcttccacaacgaggacatcggcgtcagccgcacgaagacctgctgctcgcttgaggacgtcgaggacgcacggcttgtcgcgctgcgcctcggcatcccctactatgtcttcaacttttcagacgacttcaaggggcaggtcatcgaccgcttcatctcgtcctacgagcgcggcgcgacgccaaacccctgcatcgactgcaaccgctacctgaagtttgagcggctctacgagcgcgcccgcattttaggctgcgacgccattgtgaccggccactatgcgcgcatcgagcaggaaaacgagcggtggctgctcaaaaaatcgctcgatgagagcaaggaccagagctacgtgctctactcgctcacacaggagcagctcgcgcatacacgcatgccgctcggcgcgatgcacaagagcaagacgcgccgcatcgcggaggagcagggcttctacaacgcggacaagccggacagtcaggatatctgctttgtgccggacggcgactacgcaggctttatcgcgcgctacacaggacgcgactgccctgcgggcgactttgtcgatgaaagcggtcatgtgctcggacagcacaagggcatcgtgcactacaccgtcggccagcgcaagggcctcggcatcgcggcggacgcgccgctctacgtcaagcgcatcgatgcggcagaaaaccgcgtggtgctaagcggcaacgacgcgcttttttctcgtgagctgacggcaaatgacttcaactggattgcctacgatgtcccgccgcgcgagcttcgcgcgaccgcgcgcgtgcgctaccaccagcgcgagcaggcagcgacagtcacggtgctttctgacgggcgcgtgcacctcgtcttcgacgagccgcagcgcgctatcacgccgggtcaggccgtcgtgctgtacgatggcgacaccgtgctcggtggcggcacgattctctgatgatattcttctctttctctcttccgctcatcccctgagcgggcgcggggcgcaggcatctgcgccccgcgttttttattcccgttcaccgagggcttcctccagcttttgcagcgcgcgcttttcgatgcgcgatacatagctcctcgagatgccgagctttttggcgacctcgcgctgtgtgcggggcatccggccgccgaggccgtagcgcgaggtgatgacctcttcctcccgctcggtcaggcactcgtgcacgagccttcgcacgcgcaggcagtcgtcgcggtcctgaatgtccaaatacatcgtgtcctcgacgccgacgacatccatgaggtagagcgactcgccgtcggcgtcggaatcgagcgaatcattgagcgacacctcgccctgtaacttcttccggctgcgaaagtacatcaaaatttcattctccacgcatttggcggcataggtcgcaagcctcgtacccttttccgggcggtagctcgaaacgcctttgatgagaccgatggtgccgatggagatgagatcgtcctgctcgtcagactgagtgtagtattttttggcgatgtgcgcgacaaggcgcagattgtgctcaacgagcacgttgcgcgcctcaatgtcgcccgcaagcatgcgctcgacgtatttcttttcctcctgtgccgagagcgggcgcgggaacgagccgcccgacaggtggagcgagagcagcatggcgtgcgtaagcaaataaagtgcaatcgacagcataaaaacgcctcctctttttctccatcctatggccgcacgggaagtccctatgcagtgcttctttccatgacatgaaggaaccattaggattcattatgtctttttaacaatgtcgaaaagtgggtatttccgttttttgtgtactcgtccaatcttgcataatcagtcgcttttcccccttgcagggtgaaaaaatgtgtgttaagatgcgttcatcttcaggaaaggagaaacgtctgatgactcagttttttgccaatgcagctgcatctcacttcgcacaggccgcctgtgccgctttctcctgttctgatatgaacagcatgattattctggacgccagccttattctgctggcgtcctttattattctgcctctggcagtactggtaagaaacaaaactgaacagcccgtccgaatcgcgacgcaacttcgacttctctcccgattctccgcacgagatagagactgatatcacgaaagaggctccgtcgattcgacggagcctcttcctcttagctttttcactttttctcgttcggccggcgaaaaaagcggaaatagatccccccattccacatttttcagaaagagagatccctccaatggactttttaaacttcctcatggcgctcagcccaattgtcgtcgtgcttgtcggcatcctgggcttcaaaaaatccgcaaaaaccgtctcgcccatcgcccttgcctggacgcttatccttgcctttacctatttcaaccttgacggcctcacgtttgctgaaaacgtcaaggtgcttgaccccctggtctggaagggcatcaaggaaggcctcaagatcgtgctgatggtcttcggcgcgttcaccattttgaacctgctgcgcgagaccggcgccatcgaggatgtgaaagccaccattgcgcagatcagcgacgaccgccgcgtgcaggtcgtcatcatcggcatgatgctgccgatcttccttgagggcgcggcgggcgcgggtgctcctgccgccatcgccgccccgttccttgtggccctcggctttaaccccactacctccatcgccatcgcgctgctcggcgacgcgacgcccgcctcgttcggcggcgcgggcctgacgaccatcaacggcggtgcggccctcgttgacgctggccttgccaccgtcgcgcagaacgccgcgatggccggccgcttccacatgttcggcgtgctcgtcatcccgttcatcatgatcggcatggcgttcggcaaaaagggctacaagggcattctcccctacctcactttcgcgggtgtgagcacgtgcctgacgatgttcctcctctccaacttcgtcggcgcagaggtcacctccatgggcacgggcctcatctccatccttctctccgttgcgtatgtcaagctcgtcggcgtgaagactccggacgaattccgcaatgaaagcgccaaccatcagcgcaagtacagctcgttcaaggccatgtcgccttacgtctacatgctcgtgctgctcccgctcatccgctacggcttccccgccgtcgttgaaaacggctttgccatcatgtgcacgttcggctacatcttctgggtcgaccttgtcattcttgtgtgcggcatcctcggcgcgctcacgctgggcgtgaacttcaagacctacaaagaggtctgcaagcgcaccgcgagcggcgtgctgccggtcctcgtcacgatgggcagcctccttatcgtcgcctacatcatgcagtcctcctccacgggcatgatgaacctcctcgcctctgacatcgccgccatcgtcggccgcttctatcccgcggcagccgtcctcatcggttcgagcggtgcgttcatcaccggcacgggccttggctccaacatcatgttcgcccagatgcacatcgacgccgcggcatcgctcggcatgaaccccatcacgatcttcgccggtcagaacgcgggcgcttcgctcggcaacctgatctgcccgaacaacacggtcgccgcctgcgcaacggtcgatcaggtgggcaacgagagcgaggtcatgaagaagaccttcaaggccttcgccatcatccttgttttgtacatggttctcgccatgctttatacctgcgtgctcttccccaacttcggcatgtaagggccgcacaaacgatcagttaactacacgggcacaccgtttttgagaaaggaagtattcttatggcaaagaaaagagttctcggcgtggtcggcatgggtcatgtcggcgcacatgtggcttacgctctggcgatccagggcatcgcggacgagcttgtactcgtcgaccagaacgagcagaagctcgcaagcgaagtgcaggatctgcgcgacgcagtcgcgtacatgccccaccgcgtgacggtgcgcggcggcgacttctccgaccttggcgtgtgcgacgtcatcgtcaacagcgtcggcaagatcgacctgctgcgcggcacgcacgaccgcgtgaccgagatggacttcaccatccccgctgtgcgcggctatgccgacaagatcaaggccagcggctttgacggcgtgctcatcaacattaccaacccctgcgacatcgtcacgcgcgagctggcactgcatctgggcctgccccgcggccgcgtgttcggcaccggcacgggcctcgacacctcccgtcttctgagcgcgctggcgcgccagaccggccttgaccacaagtccatcacctgctacatgatgggcgagcacggcaaccagcagttcgcgccctggtcctgcgtcagcttccgcggcgtgccgctggacgagtgggccaagaccgacgagcgcttccgcttcgaccgcgacgcgctgcagaaggagtccatcgagggcggctgggtcacgttctccggcaagttctgcaccgagtacggcatcgccaccaccgccgcgcgcatggcctacgccgtgctgcacgacgagaaggtcatcctgcccgccagcacggagctgtgcggcgagtacggcgaagagggtctgttcgcgggtgttccctgcgtcatcggtgaaaacggcgtcgagcaggtcgtcgagctgccgctgaccgccgacgagaaggctaccttccacgcctgctgcgagggcgtccgccacaacatggagcatctcaaggaaatctaaagagcaaacaaatttcgacaggaggtcatccttatgaatatcacgatcactaagactacccatcccggcacgctgcccccgtccgaccagctcggcttcggcaccgtgttcaccgatcatatgttcctgatggactacagcgccgacaagggctggcatgacgcgcgcgtcgtgccctacggccccatcacgatgtccccggccgcgagcgtcctgcactacggcaccgaggtcttcgagggcatgaaggcttaccgccgtcccgacggcggcgtacagctcttccgcccctgggagaacgtcgcccgtctgaaccgctcctgcgagcgtctgggcctgccccagcttgatcccgacgatgcgctgcaggccatcaagaccgtcgtcaaggtcgacgagaactgggtcccgagcgatcccggcacgtccctctacatccgtccgttcctgtacggcactgacccgacgcttgccctgcacggcgtgcatgaggccacgtttgctatcatcctctccccctccggcagctacttcaaaaacggcttacagcccgttcccatcatggtcgaaaccgaggacgtccgcgcggtgcgcggcggcacgggcgaggccaagtgcggcggcaactacggcgcggccaaccgcgcgggcgaccgtgccatcgaaaagggcttctctcaagtcctgtggctcgacggcgtggagcgcaagtacgtcgaagagggcggcggcatgaacgtcatgttcaagatcaatggcaccgtcgtcacccccgcgctgactggctccatcctgcgcggcgtgacgcgcaagtccgccatcgagctcttaaagagctggggcgtgcccgtcgaggagcgtctactgagcgtggacgagctctttgacgccgcggcgtccggcgcgctggaggaggcgtggtgcatcggcaccgccgccgtcatctccccgatcggcgagctgagctggggcgacagagactacaaggtcaacgacaacaagatcggtgcgctgtctcagaagctctacgacgagctgactggcatccagtggggcacgaagcccgacccgttcggctgggtctgcccgatcgactaattttgctattctctcatctctcgatctctctcatatagggaaaaggcggtgcgcttgcaccgtcttttccctattttatcgttttgttatcgtttaaattcatgcaaattgcaaaatagttctccgcttattttgatagattttaagattttgtctcgctttctatgtctgactattgattttttaaaattaaatgatatactaacctcatcaaccaaaagaaaaaggaggagctttccatgcctacgcaaaaaaacaccgcacggctgtcgaaaaagccgccgctgtcgcctgaggaactcaagcagatcgacgcttactggcgcgcgtcaaactacctgaccgcctgccagctctatcttctcgataatcctctgctcgagcgcccgctgcgcgagagcgatctgaagcagaccattgtcggccactggggcacctgcccgggccagaacttcatctacacgcacttagaccgcgtcattaagcgcgatgacctcgatatgatctacctttccggccccggtcacggcggcaacgccatggtcgcgcaggactggctggacggcagctatacggaggtctaccccaacatcacgcgcgataaggagggcatgcagaagctcttcaagcgcttctccttccccggcggcatcccgagccatgtcgcgcccgaaacgccgggctctatccacgagggcggcgagctgggctattccctctcccacgccttcggcgcggtggcggataaccccgacctgatcgcggcctgcgtcgtcggcgacggcgaggccgagaccggcccgctcgcaacgtcctggcacggcaacaagttcatgaacccgatcaccgacggcgcagtcctgccgatcctgcacttaaacggcttcaagatcgcaaatccgaccatcttctcccgcatgagccacgaggaggtcgagtgcttcttccgcggctgcggctgggagccgcgctttgtcgagggtgacgagcccgagacgatgcaccagcagatggccgccgcggtcgactgggccatccgcgagatcaagcgcatccagcgcaccgcgcgagagagcggcaaggcgagccgcccccgctggccgatgctcgtgctgcgcaccccgaagggctggaccggtccgaaggaggtcgacggcaacgcgatcgaaggcagctggcgcgcccatcaggtgcccatctccatgggcgcggatgaaagcaagcacctgccgctgctcgaacaatggctgcgctcctacaagcccgaagagctcttcaacgaggacggtacgccggtcgagctgatcgcgtccttcccgcccaagggcgagcgccgcatgggcgcaaacccgcacgccaacggcggtcttctcctgcgcgacctgcgcacgcccgacttccgcgactacgcggtcgatatccccgcccccggcgaggtcgaggcgcaggacatgtacgtccttggcacctatgtccgcgatgtgatgaagctcaacatggagtcgcgcaacttccgcatcttcgcgcccgacgagacggcgtccaaccgtttgcaggccgtgtttgacgtcacgggccgccgcttcctcgacaagcagatcgatggcatcgacgagcaccttgaccccgacggccgcgtgatggactccatgctctccgagcacttctgcgagggcttcctcgaaggttacctgctgacgggccgtcacggcttctttgacagctacgaggccttcatccgcattgtcgactcgatgttttcccagcacgccaagtggctcaagatgtgcaatgagctcccctggcgccacgatatcgcctccctcaactatattctcgcctccaacgtctggcagcaggaccacaacggcttcacgcatcaggaccccggcttcctcgaccacgtcgccaacaagaaggccgacgtcgtgcgcatgtatctgccgcccgatgccaactgcctgctctcctgctttgaccactgcatcaagagccgtaactatgtgaacgtcatcgtcgcgagcaaacacccgcgccagcaatggctgacgatggagcaggccgtcaagcactgcacgcagggcatcggcatctgggagtgggcctcgaacgatcagggccaggagcccgacgtcgtcatggcctgctgcggcgacacgccgacgcttgagactctcgccgccgtgacgatcctgcgccgcgagctgccggaactcaagatccgcgtggtgaacgtggtcgacctgatgaagctccagccgcacaccgagcatccccacggcctgaccgacgcagagtacgacacgctctttaccaaggacaagcccatcatctttgcctaccacggctaccccacgctgatccacgagctgacctaccgccgccacaaccgcaacctgcacgtgcgcggctataaggaggaaggcacgatcacgaccccgttcgacatgcgcgtgctcaacgatatcgaccgcttcgatctcgtcatcgacacggtgcagcgcctgccgcagctcggcaaccgcggtgcttacctcatccagaagatgaacgacaagctcgttgagcaccgccagtatatcaaggacaacggcgtggatctgcccgaggtccgcgcgtggaagtggaacgacggcaagggcgttgaggtgtaaaaggaggaaaggcaatgcgtattgcgatccctgttgtgagtggggaggttttctccccgctcgccaatgccgaagccttccatttttatgaggacgaccacggaaagatcgtgcgcgagttcctcgagccgatggaagaaaacggcaccgacgctgccgtcggccttttggagcgttacggcatcgacgcgctgctctgcggcacgatcgacgacaccgagcgcaccgctgtcggcatggcgggcatcatgctcttccccggctattccggcaaggcagacgacgccgcgctgcgctttctgagcggcagcgtcgtgtccgacccgaacaaccactgcaacgcctgcggcttcaaaggagcgtgctccctgaaggataaaggcggctgcggcggcaactgaacagcaaaaaggagcaagctttcggcttgctccttttttgcttgatattgttacgatgcggggcgcgtggtggagaggaagtccgagttgatccagccaaacttaccgtccacgctgacgaacgtccacccatcctgcttggccgcagcctgtacctcgctgccgagcgacacggtcgtgaccttgtcatagctcgtgcccgggccgctgcgcagattcacgccgccggtggtgtagtaaatgtaatacttgtcatacacagaactcggcctgacggagacctcgtcatggcctgtgaggtcgagccagtcgatcgtgtcgccgcccgtctgattatcgccggtcgtgttatcgccctgcgtggggtcgcccacatcgttctctccggtgatcgagccatcttcgccggtcacagtctggccgtcctcgccggtctgcgagccgccgcgcagctgctcgatctttgtctgcgccgcggcgaggtcgctgcgcgcgctcttgagcttgaagcccagcacgaccaccgtgatcaggagcaccagcgaaagcgccagcagtcccataaaaagcacataaagcggattgcgccgcggtttgcggcggctgacccgacgtccttccataatgattcccccttatcggtttgttcgcctttattgtacataattttcacaagttatgtcaagtgcctttcctctttagacgcgcaaattcacaaaaagttcccacccggtgcaaaaaaaggagatgaccaaggccatctcctttcagcggatttactttttgtttgcgcgctccttgcggcgctcgagaagttccttgggctcggcctcggcgagcttgcgctcgcggcgctcgaggacttccttgggcttttcggtgatggcgccggcggccttgagagattcctttgtcgccagcgggccgaccagctcgtaaatcagcacagagaagaggatgatgttgcggatcagctcgccatccgcaccgagcgcctgcgcgctcacgcacataccgagcgccacaccctcctgcggcagcagcatgatgccgaggtacttctgcaccgtgtggtcgcagcccaccgccttggccgaccagcgcgcgccgcaatacttaccggccgagcgcgcgatgatgtacacaatgccgatgagcacgagcacaccctgagaaaagacgctcaggcgcaggttcgcgccgctgatgacaaagaataccgcgagcatcggcgtgctccacttgtctgcgcgatccatgagatcgtcggacagggggcagatgttgcagaacaccgtgccgagcatcatgcacacgagcagcggagaaaagccgcaatccgtccctgcgacggtgaactccaccgccgaaaggccgaccatcaagaaaatgaacgcgatgctcagcgacagacggttggagttcgagcggaacatcgtctcaagcttcgtgagtacgaagcccgcgatcgcaccgagcagcagcgagccgacgatctcaatgagcggggagagtaaaatgcttgcgaggctgaactgtgcgctgtccatcgcgcgggcaataccgaaggatacggcaaatgcgatgagacccaccgcgtcgtcgagcgcgacgatcggcagcagcagatccgtgagctcgcccttggccttgtactggcgcacgaccatcagcgtcgtcgcaggtgcggtggccgtggcgatcgcaccgagcgtgatggccgcagggacggacagcacatcggggcgcaggaagtggaaaatcacgagcgcaacgtcgacaaaggccagcgcggccagcgcctgcaagacgccgatgaccatcgcctgcttgccagtctttttgagctggctcaggcggaattcattgccgatggaaaaggcgataaagcccatcgccacatcggagatcatgctcagcgcctcgacctggtcgtagcttgcaaatccgaggcccggaatgccgaggcggcccagcacgaacggtccgatcagaacgcccgtcacaagaaacgccgtgacatcaggcagatgccagcggctaaaaatacgggtcatcaaaagccctgcgagcagcgcgacggccagattcaaaatcgcagtcatggtaataccctcacaacagaaaaagtacgggcaaacagagccgcccaagacacatattgtagtctgtctgttcgtaaaaagcaagcactattttgcaagtttcctgtcaaagtaagaaaaaatggcagctttttgggcaaaagctgccattttgtttcgtttcacacaattcagtctgtgttcgcgcgcacaccggcgaagtagctgttgccaaagccgtcggtgtagacgccgcgcagcgtgtcgcgcagcatgtgcgccgtgccgtcaaaatacacgggcgagagcgccgtctcaccgagcagcatcgtctccgcatcgtgcaggaacgctgtgcgcgccacaggattttccgacgctctggcgacgcccatcagcacgtcgtaggtgccgttttcatagccgatcaggttctgctcatcctcgctgcaccagcggtcgaggaagcccatcgcgtcgtcgtagagcgcggtgaccttttgcagcgcgagctcgtagttccccgcttccatgcgcgcgttgtactccgactgcgtcacgccgcgcagtatcacgttcacgccgagcgtcgtgctccacatgctttgcagcgcgctcgccacggcgtcattctccgtgccggtcacgtacagaagctcgaccggcgggaacatgctcgtgctgtaatagcccgcgtaggtcagctcctcctgcgcttgcgttgcccgcgcgctcatgccctcttcatcgatggcgcagagctcgccgcccgtcgtgcggaaatcgtcctccgtttcgccggaatccggaatgccgtagggaacaaggcccgttgcggggctgttttccgcgccgcccgccgccgtggcggccgcgcggtcgatggcaaggtcaaaggccttgcggatgtgctcgttcgagaacgtgtcgctctcgttgttgtaaaggacgctcgccgtcgcgtacaccgccgtcggcttccagctctcatcctgtgagagctcggcgatcacgctgttgggcaggtgggcgatgtagtcgatctcacccgcttcgtagagctgccacgcctcgtccgcgttggcagtaaagatgaagtgcagctcgtcgggcccgacgagacgtgcctcgtaatactcgtcgttgcgcgccgccgtcagctcaccgctcttcgtccacgcgctcacatggtacgcgccgttgctcactgtgtccggcgtgtcaaagcctccgccgttctctgtcagatcgcggcgcagcggcatcgtggcaaccgccgtgcagatgccctcgataaaataggcgcacggcgcgctcagcgtgacgacgaacgtggattcatccttggccgagacctggagcttcgtcttgtcacctgtctcgcgcacgtcgtcatagcccgccaccacgctcatcagcgcgtggttcggcgaatccgtcgcggggtcggcaagtctctgccaggcatagacgaagtcatccgccgtcaccttttccccgtccgaccagcgcgcagtggagcgcaacgtgaagcggtaggtcacgctgccgtcgtagttcgtctcctcagtgtactccttggccatgccgttcgtcagcgtcacctcgccgctgccgtcgtcgctctcgcgcatcaggttttcatagagtgcgtagaaaacgctgtctgcatccgtgtcggtgttcatcgcggggtcgagcgagttgatcacgttgcagacgctcacgttcaggacgaatttctcgtctccttgcttcttctccccgcagccggagagaaggcccaacagcatcagcgcacagagcgccagagctgtgatcctctttattgctttcatcatgcctcccattggcaaaacgcagcgaaggctgcttggttttttgtaatacggagatattatagcgaaaatcattcgccttgtaaaggtgaggggcataaaagttacagtttgttaccattttcatttccccgaaaggggaaataccactttttgcgcccacagggcgcaggggggaaaagcagcgccggaggcgctgcacggggaaagggggatattctctcacgtgagagaatatcccccttgaacccccccaagagaacgcgaggggaggtcccctcgacccccgacattggcagtttgcagcttgaagaactgcaaacgctgcgcattcgggtgcggtgtacatggcttcgccatgaatccctgcgagtcgtaacaactctcaaccgcgccttactatcgtgaggcgcgagtgacgtttgcttggcgacgaactgcgtgcgaaatagcggcattgctgcgctcgccgcattgtggagactggcggtaaacgagaattacggcgcactcctacaagatgagcagagcggcacccgcaagggggtgtgccgcatccgtaagtcgtcagagccaccaacggctgcgcaacagcggataataggagtaggggcaaatcgtatcgcaatgctaacgcggctttgccgcgcgcaggcattttcattccggaggcataaagattgttcgagctccagactgccaatctaatccctttctcttgggggtcaaagggggatattctctttcgtgaaagagaatatcccccttaaccgcgtcccctgcacggtgcaggggcataaagctctgttagtcttcgactaacttcccctccgcatccagatgtgccttcttgacctcattgccggtgaacttggcgattccatccaacctcataccggagggataatccgacaccagtgtgtacgccacgccgcggcgcttggcgcggcccgtgcggccgatgcggtggacgtaatactcgttttcaagcggcacatcgtagttgaacaccgcatcgacgtcgtcgacgtcgatgccgcgggcggcaacatcagtcgcgacgaagattggcagctcgccgcggcggaagcgcgccatgacggcctcgcgctttttctgcgggatatcgccgtggatgcagtcagcctcgaggccttccatcatcaaaaacgccttgagccgctctgtcatgcccttcgtgttgcagaacgccatcacgcgctcgtggccctcggcgcggatgatctgcgccatgacatgcgccttgtcgttctggcccacgtcgatgcggtactgcgcgatgtcgggcttattctcctccttggcctgcacggtgatctcctcggggtcgcgctggtacatccagctgatgtccatgacctcgcgcgagatcgtcgcggagaacataccgagattgcggcgggaagccagcttgtccagaatgcgagtcacatcgtggataaagcccatgtcgagcatgcggtcagcctcgtcgagcacgacggtcttgacgttgtcgagcttgacggtgcggcgcttcatgtggtcgctcaggcggcccggcgtcgcgacgacgatctgcgggtgctttttgagcgcgtcgatctgcttgccgatgggtgcgccgccgtacaggcacacgatgcgcacgcccggaaggtagacgcaaaggtcgcgcagctccgccgtgatctgcatggcgagctcgcgcgtcggcgctaagatgacggcctcggtctcctcgctgccgggctcgatgtgctcgatgatgggaatgccaaaggcaaaggtcttgcccgtgccagtgggcgccttggcgatgacgtccttccactcgcgcatcggcgggatgcagcccgcctgcacgggggtactctcttcaatatttttctttttcagtgcgcgctggacctcttcggtcagtccgagagagtcaaagcgcacgccctgtgtgaattccatagcgttttcctctgttttctcatattttcagtcgtgtatgattatatcatggctgtcaacctgttttcctcgccccagatgcaaagctggtcaaggaccttcatcaacgactttccgcgctccgacagcgaatactccaccttcggcggaatctgcggatactcctttcgcacgatgagacaatcagcctccagctccttgaggttactgctgagcgtcttatctgtgatcgtcccaagatagcgcttcatctcgttgaaccgcaccggctcatactccatcaggcaatataagatcaccatcttgtgcttgccgctgatgagcgacatcgtgtagctgaatccggtgtcggcaaaatttgcgcttttgatatacttctccatgcaggacatatttacacttcccttttagaaagtacctgtatttattaatagtacttgtgttttttccgatgcatgctatgatgatagcaggatgaccatatgaagtcaatccaaaatgcaaatggaggtcgttaataatgaaaaaagaattgggtgtccatccctatctgtttccaatgcccgtgctgatgatcgccacttacggcgacgataatgtcgtcgatgtgatgaacatggcgtggggcggtatctgtgccgaaaacatggtttctctcaacattgacgaggatcacaagacctcagagaacatcaaaaagcgcggtgcgttcacgttgagcattgcggacattccccatatcgaagccgccgatttcttcggcatcgccagcggcaacaagatgccggacaagttcgagcgcagcggcttgagtgctgtaaaaagcgaaaaggtagacgctcctattgtgcaggagttcccgctgacgctggagtgcagggtcgttgaggacaagatggaggtctacggccaccacatcatcggcgagatcgtcggcgtgctggcggatgaagccgtgctggatgaaaaaggcaaggtggacgccgcaaagctgaatgcatttgtgttcgaccagttccgcagcggctactatgccatcggcgaaaaggtcggtcaggcatggcacaccggcgcaccgctgatgaaaaaataaagataatccctgcacttgcaggcaaactgccagctcgctatgccgatcttgcttttcaggatacgacacgaaggatgccagggcgttttacgccaacaatgaagcgctgatgggcaaaaagaaggccgttttcctcgccgcgatggccgatgaggatcaaaagactgcctccggcgcgaacgcttcgtttgacctcatggccgactatctcggctgggagatcgtgggcaggctgaatgtcggcggctgctccacggcggccgatcttcacgaagaagacctgaccgccgcttacgagctcggcaagaatctgtaaacagttgatcgtataaaaaaagaggacttgctttgcaagccctcttttttattgtcgaaacattctgctgttgtacacggccaacgccgcgatgagcgacagaacagtggaaaagatcagcttcaccggcgcgagcgcttgcagactggcgagaaaatacgtccagccgtcggcttccagcttgatgcgaaaggccggaatgcaatagcccatcgcgacatacgccgcggcaaagatcacggcaaacgctatgatcgcccagcgtctctttttcatctcccacgctcctttcttatcactgtaccgcgcagccgccccattcgacgaccgtgaagcccgtgcgctcgggtgcggaaagctcctgcgcgggaaggtcgacaaatttctccgacggctgccacgccatgaagacgcgcagcagcgtgtcaggcacgggatcgaccgtgagcttggcagaatccgtataaacgtcctgctggaacgaaatcagattgtaggcgttgtcctgcatctgcggcagccagtagatgatgaactcgttcgcctcctcgcgcgttaggcccagctgcgcgagcgcatcctcgaggaacgccgcggtgtcctccccctaaacgcagaagccagtggaaaaatcgtagcttgcctccgacgtgccctcccagtagaggtagcggtaggtttggccgctctcgtccgtcagcgtgccatccggcgcggcgcggacgctccagccgtcaccgtaggcgggataggcgcacgtcagctcgcccgcaagatcaagtgtcacgcgcacatccatctcctgctcggggtatagataaatcacaggcttttcgttactcacctcttccttcggttcccgcccgcaggccgagagcgaaaagagcagcaaacacgcaagcataagggaaaataacttcttcatgacagagtcctcctcatcagtagttgttcctttagacgcaagaaccatcaaaaaagttccaaaagcctcgcagagtttcacgcccgcaggcgtgaaatctatgtaatccgttttctgccgcgacatgtgcgtggcagaaaacactttgcgcgaagtgagcgtcgaattgtccgcttaaatcggacaaccgaggcgcagaacgaagcgaatctttacaaagaagtggcacagccacttctttgtaaaaatcaaaagagggacagctttgctgtccctcttttgaaatctttatttgtgcggtacatgccagatcgtatccgcgtactgcgcgacggcgcggtcggcggcgaagatgccgctgcgggcgatgttgatgagcgacatgcggttccattcctcgcttcttgcgtaggtgtctgccatgcgctgctcggcggcgcagtaggacgcgaagtcctgcaagagcatgtattcatcgttcatcagcagccgcgaggcgagatcgtcgtaggaaacgccgtctgagaagcccgccttgagcttgtcgatcaccgcgcgcaggttctcgtcgcgcgcgtagagcttctgcggggcgtagccctcgcgcttgaggcgcacgacctcgtcggcgtgcaggccgaagaggaacatgttctcatcgccgagcctctcgtgcatctcgacgttcgcgccgtcgagcgtgccgacggtcagcgcgccgttcatcatgaacttcatgttgcccgtgccgctggcctccttgccagcggtggagatctgctggctcacctcgctcgcgggcatcagatgctcggcgagcgacacgcgatagttctcaaggaacaccacctgcagcctgtcgcggcagatggggtcggcgttgatctcagcggcaagggagttgatgaggcggatgatgcgcttggcgaccgcgtagcccggcgcggccttcgcgccgaacaggaacacgcgcggctgcatggcgcggttcgggtcgttttgcagctgttgatagaggtagatgatatgcatcgcgttcaaaagctgacgcttatactcgtgcaggcgcttgacctgcacgtcgaagatcgcgtcggtgttgagcacgatgccctgcgtctttttgacgtaggcggcaaaatcgagcttattcgcgcgcttgatctcgccgaggcggttcagcaccgcggtgtcgtctgcataggcctcgagctttttaagcgcttcgggctgcaggaggtattcatccccgcctgcgagcgcgcgcacgagctcgtcgagccgcgggttgatctgcgcgagccagcggcggtggtcgatgccgttggtcacatttttgaacttctctggctccatcgcgcactggtatttgaaaacgtcgtttcgcaggatgtccgagtgcagagcgctcacgccgttgacggccatgccgccggcgatgcagaggttcgccatgcgaacctggccgtcccagatgatagccaattcacgcgttttggcttcgtcgtggtagtagttttcgattttttcctgatagcggcgcgcgatctcggtgatgatcgtccacacgcgcggcagaagcgactgcatcagctcctgcggccagcgctcgagcgcctcggaaagcaccgtgtggttcgtgtaagcgacggagtgcgtcgtaatgttccacgccgtgtcccagtcgaggcccgcgtcgtccatcaggatgcgcatgagctcggggatgacgagtgcggggtgcgtgtcgttgatctggatgacattcttttcgtggaaattcgtggccgtgccgtagacctcgatgtgcttgcgcacgatggactgcacggtcgcggagacgaagaaatactgctgctttaagcgaaggctcttcccctcgggatggttgtcctcgggatagagaacctttgcgatggtctcggccatcgcgtgctgctcctgcgcgcgcaggtattcgccctgtgaaaagagcgacatgtcgagcggcacgggggacttcgcgtcccagaggcgcagcgtgttgacatgcttcgtgccgtagcccgcgatctccatgtcgcaggggatagccagcacctcggtctcaccctcgggcacgacatgcagccgcccgtcgtcccagaactggcggaccgtgccgccgaagcggacggtctcggtctcctgcggcttgggcagcagccacgcgccgccgaggtccttccagttgtccggcagctcgacctgctggccgtcgacgatgcgctggcggaaaatgccgagctcatagcagatggaatagcccgcggcggggatgtcgagcgtcgtcatcgagtcgagatagcacgcggccaggcggccgaggccgccgttgccgaggcccgcgtcgggctcgctttcaaagatgtccgctgcgcggaagcccagctcgtcgagcgcttcggtcagaatttcgccaacgcctaaattgaacgcgtttttcatcaggctgcggcccatcagaaattccatcgacaggtagtgcacctgacggcggtgttcctcgcgggtctcgcgcatggtgtccacgctgcgctcggccatcacgtcacgcaggacaagggcgctcgcgcgcatcatctgcgcatcgttcgcctcctccacggtgctgccgaagctgactttcagcttttcgcacagcgcgtctttcattttcttcacagagtcaatggtcatagatcgttttccttttctttatcggcagatggattcgtaaatgttgcggtattcctgcgccgagcgcgtccagctgaaatctgcggtcatgccgcgctgctggagcatcgcgtaggcacccttgttgtcatggtaaaggtcaatggcctcgcagatcacgtggcacatgtcgccagcgttgtagttggcaaaggtgaagccgttgccctgtccgttccaggcttcatacgcgtggacagtgtcctttaatccgccggtctcgcgcacgatgggcaccgcgccgtagcgcatcgcgatcatctgcgagagcccgcacggctcgctcttcgacggcatcaggaagaggtctgcgcccgcgtagatctgcatggcgagctgctcggaatagccgaggtagacggccatacgtccgccgtagcgctgcttggcgtactcaaaaaacgtctcgtacttcgcgtcgcccttgccgagcacgacgaactgtacgttcttgcccataaatgcgtcgagcgtttcgcacacaaggtcgagccccttgtgagagacaaggcgcgtgaccatcgcaaggatgggcgtgtcgggccgttcctgcagccccagcacgcgctggagcgctgccttgtccttcttctttccggcaaggtcatcgggcgaatacgccgctgcgaggctcttgtcgcgcgacgggtcatagcgctgcatgtcgatgccgttgagcacgccgtggagcttgcgcgcgttcatgctcatcacgttttccagcccgtgggcaaagtacgcgtacttgagctcctgcgcgtaggtcgggctcacggcggttacggcgtccgccgtgacgatcgcgccctttaaaaggttcacatcgccgccgaattcgatcgtgccgccgtcgaaccagccatgatccaggccgaacaggtcttcgaccgtgcggctgccgtagcggccctgatattcgatattatgcaccgtaatgacggttcggattcccttataaaagtcgtcgcgcacggcttcatccctgatgtagatgggcacaagcgcgctctgccagtcgttgcagtggacaacgtcgggcttttgcggcagggacttgagcagttccgtcaccgcgcgggagaaaaagccaaagcgctcgccgtcgtcatagtagccgtagagctcgccgcggcggaaatacgtctcattgtcgacaaagtaccacgtgacgccgtcgcgctcgaacgaaaagagcccgcagtagacgctgcgccacgcaaggcgcacgaacgtccacttttcaaagtggagctgctcgccccacttgtccttcacgcgctcgtaaagcggcaggatgacgctcacgcggtctccgtttgccgcgagcgcctgtggaaggctgccggccacgtcggcaaggccgcccgtcttgcaaaaggggaccgcctcgctcgtcacatacaaaatgttcatctgcaagctcctttcttctgtttgctgcttttatacaatgctgcccttgctcacggcgagcgggtagctctcgtgtccgatgagtgtgccgccgcggcggatgcggacatccttgtcggcgatgacgcagccgagcgtcacgccgtcctccaccacggtgtttttaaagaggatgcagtttttgacggtgctgcccttgccgaccttgacgcccgggaagaggatgctcccctccacactgccctcgatctggcagccgtcggcgatgagcgagcccacacagcgcgaatccggcgcgatgtaggacgccgcctcgtcatcctccttggcgaggatgggccgctcggcgcagaagagctctgcgcgaatggcagggtctaacagctgcatgctgcgctcatagtattcgcgcaccgtgcgcagctgcgcagcaaagccgtcccacaggaaggcgcgcaggtcgagctgatcgcccataccgccgagaacgtcgctgcggaagctgtatttatcctgcgcagcgcactcgtccacaagggaaatgagcagatcgcggctcagaaggtagatctccaggctgcggcagccgctcgccttgtgcggcgcgcagcgcgtctcggtgatgcggcccgcctcgttgacggtgaaatacgtggcgttttccacaaactggccgctctcggtgcagacgcaggtgatgtccgcgccgctttcgatgtgcgcgtccagcaccttctgcagcggcagattgatgataaggtcgctgtcggacaggacgacgtacttctgccggatctcgtgcaggtacgaccgcacgcccgagagcgcctccatcttgccgcggaattcctccacgccgaacttgcgcgcgtcggcaaagggcggcagcagcttgagaccgccgttcttgcgcgccatgtcccacgtcttgccgctgccgatgtggtcgagcaggctttgatagttgccgtgcagcacaacgccgacatctgtgatgcccgcgcccgccatgttggagagcatgaagtcgaccacgcggtagcgcccgccgaacggcacagagccgggcatgcgcgcttcggtcagctcgcgaaggccgggagccttttcataggcaaagatgatgccgtgcagtccgttcatcgtaccgtctcctttccgtccacgctgcgcatgcggttggcaggcagcacatagtcatccgcgaccgccgcgccggggccgagcaccgtgatgccccactgctccggcggcaccgcctcgggcggcgcgccgacaaaggcgtgctcgccgacgacgccgttctcgccgatgatggcgtaggagacgcgcgcgtcctttttgacgaccgcgccgggcatcaggatggagtactggacgcttgcgccctcctccaccgtgcagcgctcagagaggacggagttctccgcctcgccctcgaccgtgcagccgcgcgcgacaacgctgtgctccacgtgcgcgttctgccccagatacgccggcggcgcagagacggagcggccgtagatcggccagtccttttcgagtaagtcaagtccgctgccggtcgcgagcatatccatgttcgcgtcccacagggagtcgagcgtgccgacgtccttccagtagccggagaagcggtacgccgccatcttttccccgttttgcagcatcttggggatgatgtttttgccgaagtcgttgctgctcgcctcgtcgctctcgtcttcgatgaggtactcacgcagctttttccacgtgaagacgtaaatgcccatcgatgcgaggttgctcttgggttgcgcgggtttttcctcgaattccgtgatcgtgtcgttttcgtccacgttcatgatgccaaagcgcggcgcatcctcccatggcacctccatgacggagatggtgcagtccgcgcccgcttttttgtggtgagcgagcattttagcgtaattcatcttgtagatgtggtcgcccgagaggatgagcacatactcggggtcgtacatgtcgacaaagccgatgttctggaagatggcgttggccgtgcccttataccacgacgcaccgcccgcgctctgatacggcggcaggatgtgcacgccgccgtccgcgcggtcgagatcccacggctggcccgagccgatatagcggttgagctccagcgggcggtactgcgtcagaacgccgacggtatcgatgccagcgttggcgcagtttgagagcggaaagtcaatgatgcggaacttgccgccaaacggcacggcgggcttcgccatattctccgtgagcacgtagaggcggctgccctggccgccggcaagcagcatggcgatacattctttcttcacgcttgttctctcctccttgtttcgttgccgcccggtcacacctcgggcggctcgttggttttctcctcttcctgccattcgccctcgcccgcgaagaacaccgcgccgagcggcgggatggtcacgcacagcgagcagggcttgccgtgcgaggggatggactcggtcaaaagctctccttcgttgcgccagtcgcccgtgccgccgtatgcgggaaggtcggtggtaaacacctcgcggtatatctttttcggcgggacgccgaagcggtagtccgcgcgtccgacgggcgagaagttgaccgccgcgatgagctcgcgacctttccggtcgcgccggacgaagacgacgacgttgttgtggttgtcgtcggcgacgagccactcaaagccctcccacgaaaagtcgatgtcccaaagcgggctctgcgataagtaaaagtggttgatgtccttgaaaaaccgctgagtctgctgattttctttgttttcgagcaaataccagtcgagctgagaggcaaaatcccactcgtgccactggccgagctccgcgcccatgaatgtgagctttttccccggatgggcgagcaggtacgccgtgaacgcgcgcacgcccgcgagctgctgccagtcatcccccggcatcttgccgcgaagcgagcctttcatatgaacgacctcgtcgtgcgagatcggcaggacgaaattctccgaaaaggcgtacatcagcgagaacgtgatgtccttgtggtggaactggcggaaccaagggtcgagcttcaaatagtggcacatgtcgttcatccagcccatgttccacttgagattgaagccgaggccgccatccttggcaggccgcgtgacgagcggccacgcggtcgactcctcggcgaccatcagcgcgttcgggtcgacggaaaacgccatctcgttgagcgcgcgcagaaagtcgatggcctctaaattctcgtgcccgccgttgatgtttggcgtccaacggccattttcgcggccgtagtcgaggtacagcatcgacgcgaccgcgtccacgcgcaggccgtccacatggaactcgcgcagccagaacgcagcagaggaaaggagaaagctcttcacctcgccgcggccatagtcgaacacacgcgttccccagccctcgtgctcgcgcttattggggtcggcgtattcgtagcagggcgtaccgtcaaagtcgatgaggccgtgcgcgtccttgcagaagtgcgacggcacccagtctaaaatgacggaaatgcccttttggtgcagatggtcgacaaagtacataaagtccctgggcgtgccgtagcgcgacgttgcggcaaaatagccggtgcactgatagccccaggaatcgtcaagcggatactcggtgacgggcatgagctcgacgcagttgtagccaaggtccagaacgtgatccgccagctcgcgcgcaagcgtgcggtagtcgtaaaaatcgccgttttcgtgccgccgccatgagccgaggtggacctcgtaaatgttgagcggcgagcggtcgaggggtgcctttgcgcggctcgcgcgccattcgtcatccccccaacggtagccgccgaggtcatagagcttgctggccgtaccagggcgggtctcggcgtggaaagcataggggtcggccttgagcacggtctcgcccgtctgtgccgtcacagcaaacttgtaggtgtcgtagcgcttgagggacggcacaaagcactcccagaagccgtccgcgttcttttccatcgggtgggcgtagccgttccactcgcagaaatcgcccacgacggacacatacgcggcgttcggcgcccacacgcggaacacgtagccgtcttttcccgcccgccgcgtgcggtgcgcgccgagatagcggtaggcctcgctgttcgtgccgccgtaaaaggctgcggcgtcaaatcgtctgccggtttgtttcatgcctcttgtcctttctcctcatagagcgtatgagcgcggcgcagtaccttattcctcgtccggcgcgcgctgcactgccgcgccgccgaggccgaaatcatcctccacgctcgccgtgtcgcggcggagcatgttttccatcacgcggatatcgctgtcgatgtccatcgcctcgttgcggtgcaaatcgtcgagctgcttgtcaaagcccttgatgagggcatccatcgtctcttcgatgcgctcctgcgcgcgggagagattctcgccctcgatgcccgcctcttcaaacttggcgtagctgtcgagcagcttgagcgtcgtgggcaggtagtaattgaggaacgtcgcggcctgctgctgcttttcgggatgctcctcgacctcgcggaaaattttgcccgcgacggtctcgagatggtcgatcttctcactcagcacggcgtcggcgatgcggtcgttcgccgagcggatggcgcgcagcgcgcccgcgtagccctcattcgcttccttgggcgtgacgtttgccttcttcgccgcttcgttcgcatagtcggcaaaggcgttggcgttgcggaagaacattccgcggccgctgtctaagtacgcgcccgtgccgagcagacccttttcgaccatgtagtcaaggtcgctttcgaccttcttgcggctcttgcccgtcacggcgcagagttcgtccacagcaatgtagccgcgcttgcccatcacggcaaggtagcgcgcaacacgtgcgctgcggcgcttcatccgctgcccggcgacaagcatggcaacgccgccggcaaagaagccgcacatgggaaaaagctcttccatcatgtaggaataccagccgtaggcgatgacctcgcccagcatggtcacaagactgatgccgaagatcgcagtgatggctgcgccgacgatcaccagaatgcgcgcggtcttgtccgaagccttcggcgcgcggttcatctttttcgctgtctgcacaacggtcttttctaccttgttcgtactgcgcgccgtaacgttcgcgttcggactggtgctcgtgcgcgtgccgccgcgcgaggaattcaccttcttcggcttgtccgagagcttggagatcagcgcgatgaggccgatgggccacaggccgaaggcaaacagcgccgcgatcaaaatccatccgccgacgtcgacatcgttctttttcttcgtcttcccgcccccttcgtcaaagcggaacgaaccggtctcgggatcgtattcaaaatccttgctcatttacctgttctcctttttctttcccgctctcgcggcgcgctcgcgctcaaagtcgacgatcttcgtcttcttgcctgtcttttcatccagcacgtagagcgtattgagctgggatttgaggtttgccttcaccgagtcgatgtagtcgcggcgcagctgcgcctgctcctccttctcctcgtcggtcaggccttcggctttggccttgtgcgccagcgcgttgatgcgcacgatcttttcatccatcgtcattgtttgattctccttacaggtatcggcgcagaagtaacgccgttcttccttttttgctcaggccgccaacctcggcaacctcaaacttgccgaggccgcgcgcggagatcacatccccctgcgcgacgggggcgtcgctcttgagcgtttcacggtagttgagctgcacgcgtcccgaggaaatgagctcctgcgccttgccgcggctcatcgaaaagccgcttgccgccacggcgtcgagccgcagcgtcgagaccgtgtcgcgaatctccttgaccttgagctcggggacgctcaagtctgaaagctcgatctcgctgaccgagagcttcacccgccccgcgctcgtcacgttttgcagcagatacggcgcgatatcgcgcgagacgatcaaatcgcatgagccctccgacaccagaatgtcgccgagcttttcgcgcgtgacaccctgcgccatcagcgagccgagaaagtcgcggtgcgtcagcgtatcttccttgcgatacgtgcagcggagcgccgtcatgtactcgctctcgtcggcctcctcctgccagtcgggcagaaagaggagcattctccgctccgcgcgctcaaatccgccgcagaaggcgcagccgtcgtggatggccgcggcgtgcagcaaatcctgcgcgctgcgctgctcagcggggctcaaaaagtccgtcgccgacgggatgttgcggttcctgctctgctcacatttatcaagaatgtgcgccagcagcacgcgctcgtcgccattgcgcgcggcgcgatccaaaagctgccgtctgtccatcatgctttcccattctgcgtgcgccagagggacgcatactcgccgttttgcgcgagcagcacctcgtggctgccctgctcggcgatgcggccgtcctcgatgacgaggatgcggtctgccgagcggatggtcgagagccggtgcgcgatcacaagcgtcgtgcgcccgcgcgcgagctcgtcgaaggcgtgctgaattttgacctccgtcacgctgtcgagcgcgctcgtcgcctcgtccagaatgaggatgggcgggtttttgaggaagatgcgcgcgatggacacgcgctgcttctgtccgccggaaagcatcgtgccgcgctcgccgacataggtgtcgaagccgtgcggcatggccatgatatcatcgtaaatctccgcgcgcttcgccgcttcgacgatctcctcgtccgtcgcgtcggggcggccatagcggatattctcgcgcaccgtgtcggcaaagaggaacacatcctgctgcacgatgccgatggcgcggtgaagggacgactgcgtaagagagcgcacatcttccccgtcgatgcggatcgcgccctcgctcacctcgtaaaagcgcgggatgagctggcagagcgtcgacttgcctccgccggaggggccgacgatggcgagcatctcgccaggccttatatgcacgctcacgtcgtggagcacgccttcattctcctcgccctcgtaagaaaagctcacatggtcgacgtcgatctcgccgcggcagtgttcgagctccttcgcgtccggtgcgtccttgagcgcgggctcgacgcgcatgagcgccgtgaagcgctcaagacctgcaaagccacgagcaaaaatctcagagaaattcgcgagctttcgcacggggttgatgaacgttgcgatgtaaagggaaaacgtgatgaggtcaatgtagttcatctcgccgcgcatgatgagatagccgcccaccgtgatgacggcggcagagagcagcgtcataaaaaattccatcgtcgcgttgaacacacccatctcgtggtggaatttgcgcttggagaccttgaattcctcgttcgccgcgttgaatttgtcgatctcctcttcctcgttggcaaaggcgcgcgccgtgcggatgccggagagcgacgactcgatgccgacgttgatggcggcagtcttctgcttctcgccgcgcgaggctgccgtcatcttgctgcggcgcgacatgatgaccgcgatgaacaccggcaggatgcacgcaacgaccagtgcgagccgccactcgatggaaaacaggatggcgagcgcgccgacgatcgtcagcgtcgaaatgagcaggtcctcggggccgtggtgggcgagctccgtgatctcgaagagatcgctcgtcagcctgctcatgagctggcccgtgcggttgtggtcaaagaagctgacgtccagctcctgcacgtgcgtgaaaaggtcgcggcggatgtccgcctccaccagaatgccgaatgtgtgtccccagtaggaaatgacatagtataaaagcgcgcgcacaatgaatgccgccatcatcacgcccatcacgataaaaaacgtgcggtactgctgattcggcaaaaggtcgtacatcgacttgcgcgtcacgagcgggaaggcgagatcgatgagcgcaacgaccgtcgcgcagacaaggtccaggatgaacaggccgcggtgcggcttgaagtaggtgaagagaatggaaagcggctttttctgctgaaattcacgggtcgtcatatggtcgatagctcctgcaaatactttttcaaggtaattgtagcacaggctggcagtgcttgcaaggaaagccgcccctttttgcgcaaaaaaagaacggcccccggccgttctttttctctttacttgatgcgcaccgtgatggtcagcaccgcgccgccaacggtggccgtcacggtcgtggtacccaccttggcaggcgcgatcaagccgtccgccgagatggacaggacgctcgcgtccgccaccgcccaggtcgcggacgcgtccgtgccggaaacgctcaggcggatggtctcgctcggcttgatcgtgcagtcaaagttgccgtttccgtccttgggcagcgtcgtgccgacgttcgtcttgatgctcagggccgaggcatccaccgtcggggtggacggggttgtcgtggtgccgggattggtggcagttgtgtcgctgccgtttgcgggatcatttgcgttcggctcatcaccggtgttcgggtcagtggtgtcgccgttgttcgcgttcggatcgtccgtgttcgtattgctgtcgtcgggcgtattgacatcgtcctgcacgccgggggtattgccgtcgtcggcgggcgtgatctttgcgacgatcttgtcaccaaagagcgaccagctcagaagcagcagcacgacgacgagcaccgccgccatcgcaccgcggacggactgcgtctgctttttatccgaaacgcgccggccgccgctctgtttgctggagttgtacttgatcttgcggggatggtctccctcctcgcagaacgggcatctgcgatagctgggggaatattcttcgccgcagcgcgggcacttgagaagatccatgccgacgctcctttcttttgtcaaaatagagtctctgcgcgcgagcacacacggtgccgcgttcctttacataatacttgcttttttgcttcgcgtcaaccgcccacgcacaaatttttgccgcattccgccgcgcggccttgctttttcgccaaagtcttcctataatcgacttaacaacaaacgattcatggagggtctggcgatgaacaccatcttcattggcattgcaggtggcaccggttcgggcaaaacgacgctcaccgagcatctgaagcagcacttcggcgacgatatcagcgtcgtgcaccacgacagctattataaatatcaggacaggccctttgaagagcgctgcaagcagaactacgaccaccccgacgcctttgaaacagacctgatggtcgagcagctcaaggagctcaaggcaggcagggccatccgctgccctgtctactcctacgcagaccaccagcgcacaagtgagaccgagctcatccggccgagcaaggtcgtcatcgtcgagggcatcctcattttccaggacccgcggctgcgcgaaatgcttgacatcaaaatttttgtcgagaccgacgccgacgtgcgcattctgcgccgcgcgctgcacgacgtgcgcgaccgcggccgcacgctcgagagcgtcatcacgcagtacttgacgaccgtcaagcccatgcacgagcagttcgttgagccgagccgcaaatacgccgacatcatcgtcctcgaaggcggccacaacttagtcgccctcgacatgatcatgcagcgcatcgccagccacatcgcctccgccgactaacacagacacgaaaaagcgtcgcagactttgtgccgtgcacggcacgaaagaattttaatcataaatcgccgcggcagaaggtgaattgccgcaaggcggcaagagaagccgccctggagcgcgcgcgtcaaaaacacttctcgctccgcgcgtgtcgcagccgcctttcgggcggcaaggcacaaagcggagcgcatctttctcaaaaaagagggacgcagctttcagctgcgtccctcttttttgagtatcttttacactcccgcgaagtggaacacgacgccgatcaccgcggagactccgataaagacgatcgggtgcaggtccttggtctttttgatgtagcgcgtgaagacgagcagcaccagcgcaaggatgatgccgcgccagctgatcgcgccgtcccacgagaatttcatcaggatggaatcctcctgcgacgcgctcgtgatcccggcaatcacctggagcatcacgcccgcgcaggccgcgccgatcaggccggtggaggcgggacgaaggccgtagaacgcgttggcgacatactggctgtcgcggaatttggcgagcatcgccgcaacgatcaaaatgacgatgatcgacggcgtcacctcgccgatggtggcgacgatcgagcccggcacgccgccgaccgtatagccgacataggtcgccatgttgatgccgacaggacccggcgtcgattccgacacagccagcatgttcatcaggtccgtctgcgaaaaccagcccgtggtcgccccgatatccttaaggaacggcagcgtcgccatgccgccgccgatggcaaacaggcccgttttgaaaaattcccagtataagcgaagatacaaggtcattttgccgccctcccctcaagatttttcagcacgatgccggacagcgccgagagcagcacgaaccacaccggcgaaacgctcagcagcatattccccagcagcacgataacaaagatgaccgccgtgcgcttatccacgaccgactttttcagcagcttgagcacagcgttcaggatgagcacgcatacacacacctgaatgcctgcaaaggcgttctgcacccaggcaaggtgggcaaagttcgtaatgagtcccgccaggatcgtgataatgacgagcgaggggaataccacgccgagcgtcgcggtgatgccgcccatcgcgccttttctcttctgcccgacaaatgtcgccgtgttgacggcgatgatgcccggtgtgcactgaccgatggcaaaatagtccaccagctcttcttccgttgcccagtgcttattctgcaccacctcgcgctcgaggatcggcagcatcgccatacctccgccaaaggtcatcacgccgatcttggcaaaggtgagaaacagttccaaaagttccttcaaaatactttctccttactccacatatccgtaaaggccgcgcacggacacctcacccgtgcggacggtctcgaccgttccgttttcgcggcgaacgatgaggccgaactcctcgtccacgtcaagcgccgtgactttctccttcgtatcctgccacaaaagctgcacctcgcgcccgatggtcacgcagcggcggcggtattcgtcaagatacccgctcgtctctccggatctgagcgccgtataaagcgcatcgagctcctcgatcatcgccgcggacagctccgcgcgcgaaatgagcctgcccgtctcgcgcaggatggacgttgcgatcttcgagacctcgccgtcgaagtcctcctcgcgctggctgacgttgaagccgatgcccgccacgacgtactggagctcgccggtctcaccctcgacgctcagctcggtcaaaatgccgcagagctttctgccgttcaggatgagatcgtttgtccacttgatctgcgagtgcgtccccgccacgcggtcgaccgcgcggctcatcgcaacggcgatgagacccgtgagcggcatcagctgcgacggcgcaatcttcggacgcagcaagatcgacaggtaaacgcccttgcccgccgcgctctgaaagctgcggccgcggcggccgcgtccgctcgtctgctccgccgcgacggcgacggtaccgtccggcgcgccgtcgagcgcgatgcgctttaagtaggcgttcgtcgagtcaatggaatcaaagcagtcgatgcgcttgccgacggtttcgacaggtcccaagtagctgcgcacggtctgctcggtcagcgtgtcgggcagcgacttgaggcagtagccgcgccccgtgacggcgtcgatctcgtacccctgcgcgcgcagggcggaaatgctcttccagatggccgcgcgcgtgatgccgagctcggcgctgacggcctcgccggagacgaagtgtcccttttcccgcagcagcagcgccaaaacagtctcttttcccatagcgtcctccgttacaaaatgtaaccgaaattgttacccttttgaggttgacagtcggcggcttatcgcttacgattgacataaaatatcaaacgctgcgtttttcgcagccgccgtcttaggattgtagcacgcttgccgccgcatgtaaaccaaaatctcatgttttggcttacccggcggtttcttgacgaattcctgatttttccattgccgcacattgccccgacgtgtacaataagacgctgacaaaagacgctgacaaattatgacaggagtttccccgtgagcttttccgaccttacgtttcttttttattttctgccgctgtttttcgcggtctattacattctgccctttcgcttcaaaaatgctgcgctcgtgctgggcagctttgccttctacttcatcggcgcgggtgcgcgcgacacactgctgctgtccggcgtgctgcttctgcactacgccctcgcccgcgcaatggcggggaaagaagtccgcacgcgaaaagcactgctgatcatcgcgctggcggcggacctcttttgcctcgtgtatttcaagtacgccgcatttattctggaaaatctgggcaaactgacggggacggcgttctctctcgttgagcttgcgctgccgctcggcgtcagcttctaccttttccagagcgcggggtatctcatcgacgtgtatcgcggcaaggaggcggagaaaaatctcatcaactacgccgccttcacgatcgcgttcccccagctcacgatggggccgatcttacgctaccgcgaatggcgcggcgcactgaaagcacgcacggtcacgcgcgaggacgtattctccggctttgagctctttgttgtcggcctgtgcttcaaggtgttgctcgccgaccagctcgcgccgctgtgggcatcgctcgagcgcatcgggtacgaatacctgtcgacgccgctcgcatggcttggcgcggtgagctacagtttgcagctctatttcgacttttccggctattcgctcatggcgatgggcctcgggcagatgctcgcgctgcctgtgccgcgcaactttgacctgccctacaccgcgcgctcggtgagcgagttctaccgccgctggcacatcacgctcggcacatggttccgcgactatgtctacatcccgctcggcggcagccgcaacggcaatgcccgcacggtgctctcgctcacggtcgtgtggtttttcactggcctctggcacggggcgagctggaattttgtcctctggggcgtgatgctgcttggcttcatcctgctcgaaaagttctgcatcggcgattttctcaaggagcataaagtgctctcgcacgtctatctcctcttcgtcatcccgcagacgtgggtcatcttccgcatcacgcgcttaaaggacgtcggcgcgtatttctcccgcctgttcccgctgttcggcgcgcgcagcgccatttccgcgcaggatgcgctcaagctgctctcatcctactggtggctgctgctgctcgccatcttcttctgcctgccgcagccgcgccgcttttatgaaaagcaccgcggcagcctgcttgtccagctcccgctgtttctgctcttctgggtgtgcgtgtacttcatcgccacctcgtcgggcaacgccttcctctattcccgtttctaaggagacttttcatgtcctctcgtcccttttttctgctgccgctgtgctttgtcagcgcgctggcgctcaacgcctatgccgcgcttgaccccaccggcgtatatcaggactatcttgaaaaactggatgccgcgacgccgcccgtcgcggcaatggccacagcggccgcagacggagtctacccgtggagcgagcccaaagcgcccgaacctcctcccgtcccagaccccgctccgcttccggacccggaaccggagcccgaaccggagcccgaaccggaagcgcccgactcccccttcaccacggtggacgcgagctactttgacgacgcgctgttcatcggcgactcgcacaccgacggcttcaaggactacgcgggcctgccaaatgccgactacctttgccacaacggcctgacggtctggtcggcggtcgaaaaggcggagttccccggcaagcagacgcttgcgcaggcgctctccggcaagcactacggcaaaatttacctgatgctcggcatcaacgagctcggtaccggcacggcggagagctgggccgcacagtacaaggtcctgctcgacgaagtgcgcgagctccagcctgacgccatcatctttttgcaggccatcttccacacgacgcaggaaaagtccgacgcgacgttctttaagaattcgaccatcgacgcacgcaacgccgagctccaaaagctcgccgacaacgaaacggtcttctacatcgactgcaatcccgtcttcgacgactctaccggcgcgctgacgccggaatactccggcgacggcgtccacgtcaaggccgcgtactatccgatgtggagagactatctcttccagtttggcgtcgtaagatagcttcaagaaagcggtgaagccgctttcttgagaaagtttcgctgcgctctgcgcctcggttggccgcataatgcggccaattcgacgctcgctccgcgcaaagtgtttttcgccacgcacttgtcgcggcgaaaaacaaatttcgatttatttgcgccgtgcgcggcgcaaactctgcgaggctctttacgtaaaaaggaaccgctcttcgagcggttccttttttgcattgcttcgttttattcgtgcttgaccttgtagccgcggttcaatctcatttcgagcgcgtcgagctcttcgtagagctcaggcggcaccttgccgatcttctcgtaatattcgcgcgcgtcctcgcactcctggagccagaggtcgcggtcaacagagagcaggcggcgcatgtcgtacatcgacatttcaaggccctccatatcgatatcgtgggtgtttggctcgtagccgagcgcggtctccgccgcgccgatctcatcgtcggcgcgcgagatgatccactgtaaaacacgcatattgtcgccaaagccgggccatgcgaagttgccatcctcgtcggtgcggaaccagttgacgttgaagatcttcggcggcttggggatcttcttgcccatgtcgagccagtgctgccagtagtcgcccatatggtagccacagaacggcagcatcgccatcgggtcgcggcgcacgacgccgacgcggcccgtcgccgcggcggtggtctccgacgccatgatcgagccgatgaacacgccgtgctgccagttgaaggactggtaaacgagcggcgcggtcttcgcgcggcggccgccaaagacgatggcgctgatgggcacgccctcgggattgtcaaactcggggctcaggcacgggcagttgcgcgcgggcgcggtgaagcggctgttgggatgcgcggccttttcggggctctgcggcgtccagggacggccgcgccagtcgatggcgcgcgcgggcggcgtcttgttgaggccctcccaccagacggtgttgtcgctgaggtcaagcgcgacgttcgtaaagatcgtgtccttgtgcgtggaaatgagcgcgttggggttcgacttcatggatgtgcccggcgcgacgccaaaaaagccgttttcggggttcacggcccagagtctgccgtccttgccgacgcgcagccacgcaatatcgtcgcccacgcaccacacgcgccagccccagcgctgcaggccctcgggcgggatgagcatggcgaggttcgtcttgccgcaggcagagggaaaggcggcggagatgtacttgatctcgccgcgcgggttctggatgccgaggatcagcatgtgctcggccatccacccctcctgacggccaaggttcgaggcgatgcgcagcgcgaagcacttcttgccctgaagcacgtttccgccatagttcgagttcatcgagatgatcgtattgtcctgcgggaagtggacgatgtacttgttgtccttgtcgaggttgcactggcagtgcaggcccttgataaagccctcatcgtcgccgagcgcgtcgcacacggccttgccgatgcgggtcatgatgtgcatgttgagcacgacgtaaatggagtcggtcagttcaaagccgtatttggcgaacggagagccgatgatggacatggagtacgggatgatgtacatggtgcggcccttataggcgccgtcggccagagcatacatcttttcgtacatttccttgggctctacccagtggttcgtggggcctgcgtcctcttccttttcacagcagatgaacgtgcggtcctccacgcgcgccacgtcgtcggggtcggtgcggtgcaggtagcatcccgggagcttgtccgggttgagcttgatgaggatgccctccttgacagcctgctcgcgcagcgcgtcgagctgttcctcttcccccgtgatccagacaatcttgtccggcttggtgatggcggtcatttcgtcgatccacgacaaaacggccttgttgttcgtcaaattcgtcatttgttctttccctcgtagcatgttcacggtgtaatgaaaaagaaaaattttgcaccgcgtcttgtgtggtgtgctgtgccgctttggggcggcagggagctaaccgatgcacaggaaaaatggctgctattgagtttgactcctttctgccgaaaattgtagcagaatgtcttatcaatagcaaccatatggtttatcaattttttgaatagatgcttctgtgctgtcacagtaatgcggcgatctcggcggacagcgtggcgaattcgctgagccccagccgctcgccgcggatgttggcctctaagccgcaggacgtgaccgcctgcgtgacctgctcttttgtgagctggctgccgaacgccgtcatcaggctgttgacaagcgtcttgcgccgcagggcgaacgcggcgtacaccacgcggaagaagaacttctcgtcctcgacctcgaccggaggctccctgcgcacgacggcgcgcagcacggcggacgtgaccttcggctgcggctcgaagcactcgcgcggcacagcgaaaaggtattccggctccgtgtagtattgcatgaagacggagaacgcgccgtaggcgctcgtccccggcgcggcgcagagccgctcggcgacctctttctgcaccagcaccgtgatgctctcgaagcacttcgactcgatgagcgcggtgatggcgggcgtcgtgatgttgtagggcaggtttgcgcacacgatgggcgtgaggcctgcgaatttttcacgcacaagcgcagggatatcggttttcaaaatatcggcggacacgacctcgaagttgtcaaagcgggccatggtctcttccaggatcggcagcagcgtcttgtcgagctccaccgagacgaccctgcccgcgcgctcgcagagctcgtggctcagtgcaccgatgccggggccgatctcaagcacgccattctgctcgtttgcgcgcgagctctcggcgatctcacaggggatggcggggtcgatcaaaaagttctgccccatggacttggaaaaatgaaaaccgtggcgctttaagagcgcctcgatggcagctttgtcattgcgttccatagcgtggttcctttctgcgcgctgggcgtaaaaaattgtaaattgattctaccatattttgcgcaaaagagtagtaaaaattttccccgtgtgataaaatgcagaaatctcaggaaaagagggatgttctcatggagctcacaccgcagatcttgatcgtcgttctgccgctcatctttcttggcggctttgtcgattccgtcgccggcggcggcggactcatcacgcttcccgcctatctgatggccggtatccccgcgcatcttgcaatggggacaaacaaggtcgtcaacggcactggcacggcgctcgcctcgttcaaatactttcgcggtggcaaggtcctgctccgtcccgccatcgtctcggggatcggtgcgctgctcggcgcggccatcggcacaaagattgctctgctcatcaacgaggacattctgaagatcatgatgctcgtcgctctgccctgcgcggcgatcctgctgatgctcaaaaaggatttcggcaaagagagcgacgcacccgcgcgcgagtacacgccgcagcaggagatgacgcgcgccgcgctcatcggtttgggactcggctgctacgacgggctcatcggcccgggtacgggcacgttcatgatcatggcgttcacaatggcgctctcgatggaccttctcacggcgtcgggctgcgcaaagatcgcaaacctctgctccaacgtcgcctcggcggtgctgttcatcttcagcggcaaggtctggtggctgctggcgctccccgcggcggcctgcaatatgctgggcgcctactgcggcgcgcgctacgccatgaagggcggcagcaagcgcgtgcgcggcatgatctttgtcgtgctggggcttctcttcatcaagatgggctacgagctgctgttttgaaaagacgaattctatataaaaaagcggacagtcaaggctgtccgcttttttcagttcttcaggctgtgcagcggcgcgggaattctgccgccgcgcgcaatgaactccgcgctcgaataagggtggaccgcctgcaccggtgccgagccgagaagtccgccgaactccaccgtgtcgcccaccttgcagccgggcgcagggatgacgcgcaccgcagtcgtcttcgtgttgatcatgccgatggccgcctcatcggcgatgatggcagcaatggtctctgcgctcgtgtcgcccggaagcgcgatcatgtcaagtcctacggagcacacgcaggtcatcgcctccagcttgtcgagcgtcagcgcgccggacgacgccgcggcgatcatgccctcgtcctcgctgacggggataaatgctccggataagccgcccaccgaggaggacgccatcacgccgccttttttcaccgcgtcgttgagcagggcgagcgcggcggtcgtaccgtgcgtgccgcagacctcaagccccatttcctccagaatgcgggccacgctgtcgccgacggcgggcgtgggcgcaagggaaagatcgacaatgccaaacggcgtatcgagcctgcggctcgcctcctgcgcgacgagctgacccatgcgcgtgatacggaacgccgttttcttcacggtctccgccaccacgtcgaacggctggcccttgacgctttgcagcgcgtgatacacaacgcccggcccggaaacgccgacgttgatcactttctccggctcgcccacgccgtggaacgcgcccgccatgaaggggttatcctctaccgcattgcagaagatcacaagcttggcgcagccaaagccgccctgcttttccgtgagcgctgccgtcttttttaccgtctgccccatcagggcgacggcgtccatattgatccctgccttggacgagccgacattgaccgacgagcacacaaggtccgtgttggccagcgcctcggggattgcagcgatcagcttccggtcggcgtccgtcatgcccttttgcacaagcgccgaaaaaccgccaataaagttaacaccgacatttttggccgcgcggtcaagcgccttggcaaacgggacatagtcttccgtctccgacgcggcggcgaccagcgcgatgggtgtgacggaaacccgcttattgacgataggaatgccaaattcccgctcgatctcctcccccgttgcgaccagatgctctgcatagcggctgatcttgtcgtagatcttttcacacgcacgctctgcgcttctgtccgcgcaggagaggagcgagatgcccatcgtgatcgtgcggatatccagatgctgctggtcgatcatacggatcgtttccagaatatcattgcggcttagcatgattctttccctccccgctcagatcttgtgcatcgcgttgaagatgtcctcccgctgcatgcggatcgcaatgtccatctccgcgccgagggcgctcagcttttccgtcagttccgtaaaagagagcgaacaattttcgagatccgtcagcatgaccatggtgaaattttcctgcaaaatcgtctggctgatatccagaacgttcacgttccactttgccagcagcgagctgacgcccgcgataataccgacccgattttttcccagtaccgtgataatggctttcattctgtgttctcctttcggtttctgccggtaattgtatcacgtcaccgcaataaagtaaatgttccggatgcgcaacatacgcatccggaacatgcatttatcgtactattcgacaaaccgctctgctcagtcgaggaagtagaccgtggagtttttctggcggccgaactgcttgcactcctgataggagttcatatagaggtcaatcgccgcgccgcgcacgccggtgtcctcagccacagcgttgccgtaggtgtagcccgacgagccgacgatgaacatctctgtgcccagcggaatgaccttcttatccaccgcgacagtgccgacatggaccgttgtgcccgtggccgttctggtgcccacgccgccgtagcccgcggtataggccgtgcaggtgaccttcatcgagccggagaagtggacggaatcgccggacttcatcagaagatagccgctgccgtcgctctcggtgacaacggacttgaccgtgtcgccgctctgcgccttgtcgacgagcgtgccggtgtaggtgatctccgcgacggaggtgtcgtttttctcctccaccgcctggcgggagacgaactggccgtcggcatacacgacctcgtaaacgatgtcgcgcgtgccgtcgatgccctgctggacgacctgcgtctcgcccttggggatgcggtacgacgtggatgtcagcgtggtgtgtggagccgcctcggtggcggtctcatagtaggtgaagtcagaggcaacggtgatctcgacctctttctccgtgacgtcgaccagcaccatctcaagcgggctgaccgagatctgcaaacggcgcagcagctcgctgacgtgctcgccgtttctcgtggtggcgtattcgatgtcgtcgccgtgtgtcaccgtcaccttttcaccggcaggaagtgtgacttccgcgtcaccgctctgcgcgccggtgacaatgacgcgctcctgcgggatgtccgttgtgccgtcgagcacgctgaccgtatcgccgtcggcgatgaggtacagcgcgtccgcgcgcagctcgggcgaactgttcagcagcatcacagccgcgaaaagcagaaaaaacatcgctctgcggcagcgctgggctgtgaacaaatttttcaaaaacttctgcatgggatactccttttttcgcggcgtgagccgccgcagcttcgcgcagctgaggaagtgcgctgcgtccggaaaagattacaaaatgtaacttttccaaaacttgctggcagtataccgcctgaaaaagaatttgtcaagtttccgccgtttgttcgccaaaagttctgtattttataaaattttcgatatttttcttattttcatcttctaaaagttgcgatttaagtcatcgaattcgtaattttctcgatttatgtaaaccatcgtcacccctctccgccgcctcgccgccatctcggcgccgaagaggcggcgcacctgccgacgctctttgtcccgtccgagcgggcaaaaaactcttgggagcaggccgggtgtgtcccgctcccgccccgcaaggcggcaaaaacgcggaaagccctgcaaacactggcttttttgcttctccgccgcacgctctatcccctcggacagcaaaggaacgccccctgcgccctttccgggcgcaggggacgaaaagccgtctcaacagcgtgtcgcgatgccaaattatgcaagtttgactttttgaaaattcatttattgaaattcatttatgtcaacctgatcttttgatttttgttggcaaaggtcacaaaaatcgcgcttctttttcgcttttcccgtcaaatgggcgatcgcagaggaagttacatttcatcctttttttcgtccgtttccccgtgaaaatgaaggtaaacggacgccgcggcgtctttcggcagtacacgttcgagggcgaaaatgtccgcctcccgaatcgccttaacgctcttgaacgtcttgagcagcgcctgagcgcgcaccttgccgacgcccggaatcccgtcgagcgccgagcgggtcgaggaccgcgaatggctctcgtggtggaacgtgatggcgaagcggtgcgtctcctcctggatctgaccgatcagggcgaagacgttcggcgcggcgtgcaggtcgatctcgcggccctgcgcggtgacgagcgcgcgcgtgcggtggcggtcgtccttgaccatgccgaagatcggcacgtgcacgtgcatctgcgcgcacacgcgctcggcgacgcccgcgtgcgtgatgccgccgtcgatgagcatgacgtccggcagggggctgaacttctcatcgccgtccagatagcgctggatgcggcgcgtgagcacctcctccatggacgcgtagtcgtccgggtgggccgacaggcttttgatcttgaatctccggtaggcactcttcttgggctttgcgccctcgtagacgaccatcgacgcgacgatatcgctcgcgccggtgttcgagatatcgtaggactccatgcgcccgggtggctcagggagtgagagcatccccgcaagctgcgtcagcgtgcggttctcgcgctcctgcgcggtcgtcacgcgctcgacgtcctcgcgcgcgttgcgctgcgccatggcaaggagctcggccttctcgccccgctgggggacgtggagcgtcaccttgcggcccgcgcgctcggtcaagatctgcgcaagctcgtccgcgccctcgatctcgcagggcagaagaatttcgcgcggcagcacgctcttattgaggtaatactgcggcagcagcgcagacaggatcatctgctcgctctcgtcctgcggcgcggcgaagaggttcaggtctcgacccgtcacgctgccgtcctcaatgtgcagcacagcgctgccgcatttgagcgcgccgcggtaaacgccccagatatcagtatcggcgcagatgccggcaatgaccttctggcgcttgcccagcacctcgatggcgcggatgcggtcgcgcagtgccgccgcctgctcaaagtgcagatctgcggcctcctgctccatctcctcgcgcagtgcgcgggtcaggcggcgatagtggccgttcagcagctcttcggcctgcccgatgcggcgcatgtactcgtcctcgtccggcgtgccgcggcagaacgcgtcgcagcgccccatgtgatggttgaggcaggggcgctccttcccgatgtcgcgcgggaacttgcggctgcatgtcggcaggcgaaacgccgcgcagatcgcgtcgatggccgcgcgcgtctcgtttcgcccgccaaacgggccaaagtagagcgcgttgtcgtccgcaggcttgccgaccatcgtaaagcgcggatagtgctccgtgccgaggcgcacaaagggatagcccttgtcatcctttaacaagatattgtagcgcggcatgtgctgcttgatgagcgagttttccaaaatcagcgcctcgaactcggtcgagacaaagatcgtgtcaaagtggtcgacctgcgagaccatgcggcgcgtcttctcgttgtgggaggaattctcctgaaaatactggctgacgcggtttttgagctttttcgccttgccgacataaatgacgcagccggtcttgtccatcatcagatagacgccaggcgcgagcggcaggtcgttcgccttgtccaaaagctcctgcttcgtcatgggacattccctcctttcttttcatctctacattataatatataatagtatatccggtcgaatggtgccggtaaaatggaaaaaggcggcttcctgtggaagccgcctttcctggttgtttgttattcgccgaaattgttggaaaccagctcgcacagagcggtcacggcttccttttcgtccgcgccgtcggccagcagcgtgatggtcgtgcccttgacgatcccgagggacagcacgcccagcaagctcttggcgttcacgcgacgctcatccttctccagccagatgccgctcttgaactcgttggccttctgaatgaagaacgtggcaggacgagcatgcaggcctacttcattgttgatcgtaacattctgagtatacatcgttactactccctctccaaaaaaatctttcggactttatcgtatcatataccatcgggggccgattcgtcaatgccatttcgcgcgaaatggcgcggatttggcaataaacacagacaaagcgcttccccgggcgggcatttatttcaactcgaccacagtgacgcccgactcgccctcgccatagttgccaaggcggaagctcttgacggctttgttgcgccggaggctcgcgtgcaccgccttgcgcagcgcgcccgtgcccttgccgtggatgatcgtcacggtctcaagatgcgccatgacggcagcgtcaatgtagttatcgagcacgctttcggcctccagcgtctccatgccgcggatgtcgagctcgcgcgcagcggacgccgtgcgcagaatgcgctgcgagggggcaaactgcggctgctttttggcagtcgccgcgcgctccgccgcctcgatgaggcggacctcgtcggctttgaccttcatctgcaaaacgcccgccttgagcgtcagcgtgccgtccttgacagctgtgacctcggcctgacggcgcgtaccggggatctcgaccaggtctccgacctcaatgggccgcgagggcttggggatgggctccgcgctctcgtcgcgcacgcccgcagcgtcgcgcgcctgcttgatgttgtgcatgatctcggcgcgctgggcgttcatctgctgggcgtcgagctttttctgctgcttgcgcagcgcgtcgagctcgcggaacgtgtcgtccgcgacggacttggcctcagccaaaaggcgcttggcctcggcttcgccgcggcttctcgcgttctcctttgcgcgctccatctgcgtgcggaattcgcgcgccttgcgcgcgtcctcctcgcgctgggcgtaaaggcggtcgacctcggctttttctttctctagctgctgcctcttctgctccagctgcgtcagcacgtcttcaaagtggatgctctcgctgtccatctgcgccttggccttttcgatgacggcctcggaaagccccagccgcttcgagatcgcaaaggcattcgacttgccggggatgccgatgagcagcttataggtcgggcagagcgtttccacgtcgaactcgcagcttgcgttttccacgcccgcggtcgtcatggcaaaggtcttgagctcggcgtaatgcgtcgtcgcagcgatcttcgcaccctgtgaacgcgcctgctcgatgacggcgatagccagtgccgcaccctcaacggggtcggtgcccgcgcccagctcatcgaagaggatcaggcagtgctcgtccgcctcgtccaagatctgcacgatgtttttcatatgcgccgagaaggtcgacaaactctgctcgatgctctgctcgtcgccgatgtcggccaacaccgaggaaaagatgctcacggcgctgcggtcgtcgcaggggatatgcaggccgcactgcgtcatcaggcagaggaggccgagcgtctttaagctcacggtcttgccgccggtgttcgggcctgtaatgacaagcgtatcgaagctgcggccgagctcaatgtcgatgggcacggccttcgcggggtcgagcagcgggtggcgcgcatggcgcagatacacgctgccgtcctttttgagctcggggcgcatggcattcatgcggtagctcagctcgccgcgcgcgaaaatgaggtcgaggtggacgagaatgtcataatcccacagaatgtcgcggctgaagctcgccgcctcgcccgagagggcatagaggatgcggtcgatctccttctcctctttcgcttcgagctccttgagctcgttgttggcctgcaccacgcccatcggctcgacgaagatcgtcgcgccgctcgaggacgtgtcgtgcacgaggcccggcagctcgccgcggcactcggccttcaccggcacgacgaagcgcccgccgcgctgcgtgatcagcgcatcctgcaaaacgttccggtagctcggggacgaaatgatgcgctgcaggatctggcggcccttggccgccgccgcgcgcttgtggcggcgaatttccgcgagctcgggcgaggccgcgtcggcgatctcgttttcgtcgaggatcgcggtcgtgatcttctcctccagaaagcggttcgggtgcagggagaggaagagcttatcgatgaccgtcccctcctcgtcctccttataatagtcctgcacgcggcgcacattcgtgagaagccccgcgatgtcgagaagctcccgcgtgttgagcatgccgccgcgctcggcgcgcgagagcgattcgcccacgtcgcgcacgccgccaaaggcagggctgccgcgcagcatgatcattttgcgcgccgcgtccgtctcgtcgagcagacggttgacctcaccgaagtcatccgatggcgtcagccgtcgcgcccgcgccttggcctccgcgctcaccgcgtgatgctcgagcatctccaatagccgcggcagttccagcacgcggatggatttttcaaacagttcactcatagttttctccgaaattttgattccgattcgtatttctttcgacagatatttcgtttagttgtcaattttcatgcttttatagaagtccagcgtcttgaatcgccggtcaagctgcacctgcgcaaacacctcgcacgctgcggcaaagcgcttttccgtctcgcccgagagggaaaacgacagcatccgcttcggctcggaaaacagcacatggcgcatcgccgcgaacgagcccgcgtccagcggcagaaggccgcccccgccgtggcccgcgcactccctgcacagcagcacgccctgctgcgcgtcgaacaccggctctttcgggttgtgcgtgccgcagacagcgcagccgtcgagcagcggctcgtagcccgagagcgcaagcagcttgagttcaaacgccgccttgacgatgctctgcggcttttgcagcgtgtcgagcgcgtagagcgaattgagcagcagcgacaaaatctccggcacgggttcgtcctccgccgtgacgcactcggtcatctcggcaaaatacgacgcgagcgacagccgctcaatgtcctgccggataccgtcgaacagcgagatcgtcgacgcctcgtcgaggtagtaccagttcccgcgctgatagagcacgagctcggaaaaggccagaagctcgctgcccgcggcgatgcggcttcccttgcgccgcgccccgcgcgccacgaccgcgatccgcccgagcgagtcggtcagaatattcaatatgtagtcggcctccttcgtcgccgtcgcgcgaaggacgatgcctttggtcacgagtttttctgacataaaactcctctaaattgttttacaccaaggggtgtaaagggtggttgccttgcaggcaggatggttttttccgcgcactgcgcggagggggaatgcagcgcgtaggcgctgctgccggtcaaagggggtgttctctttccaaagagaacaccccctttggaacccccagagaaaggcaagggggcttcccccttgaccccgcacattggcagtttgtagctcgaagagctgcgcagcctgcggaatcgggtgcggtgtacatggcttcgccatgaatcttctgcgattcgcgacaactctcaaccgcgccttactatcgtgaggcgcgtgtgacgtttgcttggcggcagactgcgtgccaaatgcggcattgcttcgctcgccgcattgtggagtgcctcggtagacgataattaggctgcactactacgagacaggcagagcggcagcggatagtaggagcaggggcaaatcgtatagcaatgctcaacgcggcttcgccgcgcgcaggaagtgcaatcggcaagcattgcagctcttcgagccgctcgcttgcaatgggaaacgcctttcttttggacgggcgacgcccgttttctttctcgggaaagaaaatggggggcgcatcacgcggcacttgtgccgcattgacattcgcacctgtgcgaaaaaggaagaattctctttcgagaaagagaatatccccctttcccgcattccctgcacggtgcagggaaaatccctcacccctcaaggggtatcatttactgccagtaaataaaaaattggctccccggttttcaaaaacagtgcgaaatatccgtttcgcaaatccctcacctcatgcttagcatgaggaaaactcccgcgaactatggctgggaaaatttattactgctcgtcgtagccgaagcttctgatatagttcatattgtcgcgccagttttccttgaccttgacccaagtctcgaggtagacctttgtgcccatgaagcgctcgatgtcctggcgcgcctcggtcgagattttcttgagcatcgcgccgtttttgccgatgatgatacccttgtggctcgccttttcgcagtagatggtcgcgtcgacctcgatgacctcgtcgtcgcgctcgatgaagcgcgtgatctccacggccgtgccgtgcggaatttccttatccaagttgcgcagcagcttttcgcgcacgatctcgcccacgacctgacggtcgggctggtcggtcgtcatgccgtcggggaagagctgcgggccctcagaggcgtacttaccgagctcgttcatcagatcgtccagccccccgtgcgtgcgcgcggaaatggggataatggcgtcaaacgcatacgcctcgctgtaggccgcgatgacggcgagcaggtcgtcctttttatcgacagtgtcgatcttgttgatgcacaaaatcgccggcaggtgagaagccttgatcttttcgatgagctcggcctcagggatgccgacgtgcgccactggctcaacgagcagcagcaccgcgtccacgtccgcaatggattcgcgcgtgaccttgaccatgtagtcgcccaggcggttgcgcgccttgtggaatcccggcgtatcgagcagcacgtactgcgtgtcgccgcgattcaccacgccgtaaatgcggttgcgcgtggtctggggcttgttcgacacgatggcgatcttctcgcccacaagggcgttcgtcaggctggatttgccgacgttaggccgtccgcagacagtgatcatagcggtttttgttttgttcatgataggtgatcctcaactttcttttgttcgttgaacgttttttattcatacagcgaaagctgtattctctttttggatgcccaaagggcgcggtgttctgtcccactgccgtggggacgcggggcaaagggggtattctctttccaaagagaataccccctttggaaccccaagagaaaggcgaggggtgttcccctcgaccctcgacattgccggattggagctcgaagagctgcacgcgctgcgcattgcacagccgttggcagctctgctgccttacggatgtggcataccccttgcgggtaatcgggtgcggtgtacatggcttcgccatgaacccctgcaattcgtcaccactctcaaccgcgccttactgtcgtgaggcgcgagtgacgtttgcttggcggcagactgcctgccgaatgcggcattgctggcgctcgccgcattgtggagtgctccggtaaacagatattagtcagcactcctacaagatcagcagagcggcagcggatgatagaagcagaggcaagtcgtatagcaatgctaaacgcggcaacgccgcgcgcaggcagttgcattccggaggcataagagttgttcaaaatcgaggctgccaatttaaacgcctttcttttggacggtcacaccgcccgttttctttccacggaaagaaaatggggggtgtggtcttgccgcccgcaggcggcattgccctccgcacctgtgtggaattatcaccgctcgagttcgagcaatttcataattgcctcttcatgttcccgcatctgcgctttcatcggcccttcgtccagatggtcgtagcccagaaggtgaagcaccgagtgcgtcacgaggtacgccagctcgcggcggttggagtggccgtattccttcgcctgcgcggcgacgtgctcgagcgagatgaccatatcgccgagcgggacgaggcccgttccggggtcggcgtcctcctcacccggcagctcgccgggggtaagctcgaacatcgggaaactcagcacgtccgtcgcgcgatcgacctcgcgcatttcgcggttgatctcgtggatggtctcgtcatccgtcagccgcacgtcgatctcacagggaaagtccaccccctcggcggcgagcgccgtgcggatgaccttgcggatgaaggcgcatttgctgtcgctcacgccgggcacgtccgacgtgacggggatataatgtctctttgccatcactttttcctcttttcgtttcgcgcggcctcatagtccgcgtaggccttgatgatgcgctggaccatcacgtggcgcaccacgtcctggtccgtgagctcgcagatgccgatgccctcgacatccttgagcacgcgcacagcctgcttgagtccgctcatcttgtccgccggcaggtcgatctgcgtcacgtcgccggtgatgaccatttttgaattaaagcccatgcgcgtcaaaaacattttcatctgctcgcaggacgtgttctgcgcctcgtccaaaatgataaagctgtcgtccagcgtgcggccgcgcatataggcgagcggcgcgacctcgatattgccgcgctctaaatatttctggtacgtctccgcgccgagcatgtcgaagagcgcgtcgtagagcgggcgcaggtacgggtcgaccttgctctgcagatcgcccggcaggaagccgaggcgctcgcccgcctcgaccgcggggcgcgtcaggatgatacggttcaccttacgctcgcggaacgccgcgaccgccgcggcgacggcgaggtacgttttgcccgtacctgcggggccgacgccgatggtgatggggtttttcaaaacggactcgatgtatttcttctgtccgatggtcttgggcttgatggggcggcccttggagctgatgcagatgacgtcctgcgtcagctcgctgatgcgatcctcttgccccgcgcgcacgagcgagatcacgtagcgcacgttctgctcggtgatgggttcgccgcggtttgagatcgtgagcagtgcattgagcgccttcacggcgagcatcgtgtcctcgacctcgccgtttacgcgcagttcgccctcgcgattggaaatggtgaccttgaattccgattcgatcagccgcacgttctcatcgaatgagccgaacaaattgaccgcctgctccatgcgttcgatgctgatgcgctgttccatgctgtgtttcctcctgaaaaaatgttgacgccggccggtcgcggctgacggtgttatccttcactgacggcaatgggcacctcttttccgatctgctcctcacactcggcggagagcgtcacgacgagggtgtcgccctccacagcggtcgaaaagcgccgctgcgtcacgctgccagtctcccccaaaagggcggcaagatacgtttcgagcacgtcttttccctgcgcctccgcgtcggcgcgggaacgtggtgttacttccaattcgtagggcagcagcgtttccgtctcccatgtaacgggcagggcaaaaaggccaaaaagcgtccattgtgtttgattctttattttatcacaatcaacattgcaaatgctactcccttttgcaccaattttcaaccgattctcgccccaaatcaaggtatggctgcgcttttcttttccggtgtaaaccttcttttcatacgtgagcggcacgcggacggtgaggtcgtaccatgtccgtgcccagacttcgcccttgcccgccaaaaagcgcgtcgtcacgctcggcttttctgtgccgcccgtgtccaccacgcccgcgatcaaaagctggccctgctgtacgctcgtgccgggcaggactcttttctccccatccagcgcgcggacttttgtgataagtcccggctttgccgcgatgacgttcgtcggctcgctctcgtttacccgctcgggtgcgcgcacgcgctcgcgcacctgcacataggccttgcagccgcgcacgttgaccgccacccagcagaggtccttgagttctggcagcacacggttgcagatatcctgcgagcggaatgagtagataaacgttccgcggtgcacgccgtgctcgcgcagggcatgcaaaatcgtctcagtcgggacggtctcgttgcccgtgacctcaaaatcccagatgaaaagcgagttgacgagcagcagcgccgcacacagaatgccgccggcaaacagcgcgtggcgtcggcgcaggcgcgcgaagaaaaacggcgtgcccgccgtgcgctcgatagatacctccgccccgcagccctcggcggcacggcgcagcgcgcgcaggtcgccgcgtgccacgcagaacgacagcgccgtatcgtcgatccacctgacgtcccagaattcgatgccccgcgcggagcagaggttcagcatccgctcggggtacgcgctctttgcacgcacgcatacactgccgcgcagcagcttgacggcttttttcagcatagctccctcatctcacatattccacggcgtcgatcttgccgaagatgcgcacctcgctgtcggtcatgctgcgcagcgtcaaattctgcccacgcacgcgcaggatgagcgagcccgcccccacgtcgatctgctctgttccgtaggacaaaatgccgctgtggccctccagaaaaagctgccggtcgcccagcatctccacatggcacagccccgccacaatgtccgccggcaggtcaaagagctctgccatgcgcgccagcatgcgctgcggccgttcgtttcgttccatcgtccatctcccctttgggcaaagcctatgcgccctttcacgcggatttgcctgtcccaggcgggcaagttcggcttgccccgcgcatagactcgtctggaaggtcaggtgatggcatgaaaataagagaccgtttgccgcttctggcggtgctgtgctgcttttccgcactgctgctgttgccggaggtcagcgcacaggcggtgcgggacgcgatgctgctctgcgcgcagacgcttatcccgtcgctgtttccgtttttcgtgctctcgtcgctgctcatcgcctgcggcgcgtcggagctgctctctgcgcttttgtcgccgctgatgcggccgctgttcggtctttcgggtgcgggcgcggcggcgctggcgctgggcctctgcggcggctaccccgtcggcgcacggaccgctgccgagcttgtggaaaacggcgcgctctcgcaggaagagggcgagcggctgctcgccttctgcaataacgcgggaccgggatttctgctcggcgtgtgcggcgcgggcgtgttttcgtccagccgcgcgggcgcggcgctgtacctcatccacgtcgccgcggcgctctgcgcaggtcttctcacctgccgcgcgctgccgccggcgccacatggaacatatccgcacaaaagcgcgaaagcgcagcgcttttccacagccttccccacggcggtgcagaacgcgctgacgggatgcctcaatgtgagcgcgttcgtcgtgtttttcacggtgcttgcgcggctgttgctgcattttctgccggaggccttcgcctcatcgctcccctgcgcgctgctgctcggatttttagagctcacgagcggcgtgctggcgcttccctgctcacgcgcgggttttctttcctgtgcggcgctgctcggctggggcggactgagcgtccactgccagacgctcagcgtgctcgcggcctctcccctctccgcgcggtactatctcaggggaaaggccttgcaatcgctgctgtcgctgctgctcgccctgcccgcgctgccgtttctgtttccctgacgctcacggctccgcccctgtgatggcgctcgccacctgcgagacgacgtcccccaccgcgtcgtcgaaaaggtgcatatacaccgcgctcgtcacggatgttgagctgtgccccagcgccttcgagatgctgaacatcggcacattctggctattggcgacgctcgcaaagctgtggcgcagcccgtggagcgagatcggcgggaggccctgcgcggcgatgaactgcgcgatgcgctggcacagaacgtccggctgatagggctttcccgcttcgttcacggcgacgtagccctcggggttgtatttggggtcctgcttccgccgcctctcccagtcgcggtgcagccgtttgagcagcgtttcaaggtcttcgctgccgccaaaggccagccgccgctcggaggcgtaggacttcggcgctttttcaagcgccctgccgctcacggcggtgcgcacctcgcaaaccgtcagaacgccgcgctttaggtcgatattgcgccatttaaggccgcagatctcgctgcgccgcaatccgaggcagcccgcgagcttgacggccacctcgagcggcgtgccctcgcttgcgcgaaagagcatgcgcagctgagaggaatcgtaaaaacggtgctgcggcgcttcgcgcgcgggcggcgtgacaaggcaggtcacattcgcccccacgatgccctgccttaccgccgcgccgagcgccgcgtgcagcagcacgtggtgcttgcggatcgtgttgttggcaaggccctttttccgcagctcgccataatactgctgcacgcgcacgggcgttaagtcctgcacgtagagcctgccgagagaggggatcatatgggtattcaagatattctcgtagccgtggcacgtcgtttcctcgcagttcggcttgatgagctcatccatccagtagcgcagccagtcctccacaaaaacttctttgagcgtgctcatgccgccgagcagctgggcgcggcggtactcggcgatgacctgctcggcctgctccatcgtgggataggtgcgcgtgcggcgcacgcgcctgccgttttcgccgtcgtagtagagcgagacatagtaaaggtggttcctgtcgtcataggacaggttccgtttgagcgtttttctcatgcgtttcttcctctttccgtcgttttgatcttttccgcaagtgcagaaaataaaaaaacaccgctgctcacgcagcggtgtttttttaagcgaatgaaatcaggcgttcttcgcgatctcgacgagcttggtgaaagcgacgggatcgttgatggccatctcgctgagcatcttgcggttgatctcgatgccggcggtcttcaggccgtgcataaacgtggagtagttcatgccgttgagcttgcaggctgcggagatacgggtgatccacagggagcggaaatctctcttcttcaggcggcgaccgacataagcgtaggtcagggacttcatgacctgctcattggccatcttgaagtggcgggatttgttgccccagtagcccttggcgagcttgagggtcttgtttcttctcttgcgcgtcatcatcgcgcctttaacacgtgccatattgtataagcctccttaaagcgtatcgttgtaaattatttgtaggggatcatcttgcggatcgtgctggcagtggtcttgtcagcatagccgccctgacgcagacgacgcgtacgcttggtgggcttcttggtcaggatgtggctcttgaaagccttggcgaccttgaccttaccggacttggtcagattgaatctctttttggaaccgctgtgggttttcagcttgggcatagtagtttctccttttcgtatttgtagtggcgctcaaagttactttcccgccttgggggaaaggaagatcgacatgctgcggccttccattttcggctctttatccaggttggcgacctcggcgacggactctgcaaagcgcacaagaagatcgcggccgatggccgtgtgtgccatctcgcggccgcggaagcggacagagaccttgacacggttgccgtcggcaatgaatttctgggcgtttttgagcttggtgttaaaatcgcccacgtcgataccgggggacatgcgcacttccttgatctcgacgacatgctggttctttctggcttccttttcgcgcttgccctgttcaaagcggaacttgccgtagtccatgagcttgcacacaggcggcttggcctgcggcgagatcttgactaagtcaagcccctgctcgtcggcgatgtgctgcgcctgcgcggcagacatgatgccgagctgctcgccggtcgcactgatgagacggatctcgctgtcccggatctcttcgttgatctgatgcacgttgctgctaataccgaagcacctccgtttttcataaagaatttggcaaacaaaaaacgagcacagaacattccgcacccgtaccatgacacaaaaaagcccgaaggctttgttttccacgattgaccccttcgctttgctgggggtgagaacgaatgcaccgctcttctttgttttgcttaagtagtatatgctctattttccggtttgtcaacaacaatttgcccgaaaaagtgaaaatcccacggtatatttttacttttgcccgtcaacactatgcttgcaagcaagaaaagcgaaaggaggcgagcacatgaaggagcgcaataatcagaacaagaaccagaatcaggaaaactccaatcagaaccagaacggcaaccagaatcagaacaaccagaataagaacaaccgctgatcgtactcaagagcgcagggctccgggaacacccggggccctgcacctttatagaaccttaatcccgcggcccttgcgcggcgaagcgtttcgtgctatcattttatttaaaatgaggtattgtaccgcttgcatttcagaaaggcgcaccatgctcgactctctttctctctggctgcacgaaaccccgctcggcgaaacgctgctcaccatgctcatctcaatgctccccgtcgtggagctgcgcggcggcctgcctgcgggcgtcgcgatgggcctgccgatccccgtggcgttcattgcgtcgctcgtcggcaacatgatccctgtgccgtttatcattttatttgtccgcccgctgttcaaatgggtgcgcatacatattccaaagcttgagggcttcatctcgcacctcgaagcgcgcgccgaggcgaaaagcgccgacgtcctccgctaccagacgtgggggcttttgatcttcgtcgccatcccgctgccgggcaccggcgcgtggacgggcgcgctgatcgccgccgtactcaacatgcgcctaaagcgcgccgtgcctgtcatcttcctcggcgttgtcatcgcgggctgcatcatcacgctgctgacgcatggagtcacccttttgttctaaaataaaaagagcgcgcaggcgctcttttttgtttctttttgtctccaaactgcaacctttttgtaacgactttcgtctaaagtcatgttaccatccataatgccgcagccgatgcggcaaacgttaaaaaggagaatcctgcatgaaacgctattttctgcgcacgcttctggccgcgctcactctcgccctgctgctgaccgcctgcggacagcagtcggatgacactgacgacaccccgcctaatgcacagctaggcaatctctatgacgactttttcgccggtaacgtcacggcgacggccaatctcatcaacgccggcgtcgaggcatcaaccgcctccttccgtgcgcccgacgtctacgccgccgagggcgcggacggctcggacatggactggacgatcaagcgctttgcgctgctcgacctggacggcgacggcacaaacgagctggtgatcgccatcgactacagcggcaacgaagaatacgtcgtcctcacctgctatgacggcacggtctatgccaatcaggtggtccaccgcggctttttgacccccaaggcagacggcaccgttgcctggtcgaacggcgcgttcgacaatggctacgcccgcttccgctttgaaaacggcgtgctggtctacgacgattttgccgccgtgagcagcgatgacagcggcagcgtcacctatacgctgaacggcgagagcgtcagcgaggaagacttcgacgccttcatcaccgagcagaacgcaaaggacgaccttgcgtggacggacttcacggtggaggcggtcagcgctgcgctggcggggtgaatatttccctgcgctgcgcaggggggcgaataaagggggccattctctcacgtgagagaatggcccccttagacccccaagagaacgcaaggggctctgccccttaaccccgccattgcaagcgagcagctcgaagagatgcggcgcttgccgattgcacttccctgcgcgcggcgttgccgcgttgggtgttgctatacgatttgatttgctcctactatccgctgccgctctgcctgtctcgtagaagtgcagactaatttccgtctactgcaagtctcatcaatgcggcgagcgtcagcaatgccgcattcggtaggcagtctgtcgccagacaaacgtcactcgcgcctcacgatagtaaggcgcggttgcgactggtaacgaatcgcagaagattcatggcgaagccatgtacaccgcacccacactgcgcagcgcgtgcagtcattcaagctgcaatcccgcaatgtcgggggtcgagggggactcccctcgtcctttctcttgggggtgtaagggggatattctctttcgagaaagagaatatccccctttcccgcgtcccccacacggtgtgggggataatagagtgcgccctgcgggcgcaaaaaaaagaagcacccttacgggtgctcccttttttattccacagtgacagactttgccagatttctcggtttatcaatatcacacccgcgctggagcgcgatataatacgccaacagctgcagcggcacaacgccgagcgacggcagcagcatttgcgccgtatcggggatggtgatgacgttttcgacagtctttgccatttcgccgcggtggctctcggtcgcgagcgcgagaacgtccgcgccgcgggccttgacctcaaccacgttgctcatggccttgtcgaaaagcggggcgtaggtgccgagcgcgataacgagcgtgccgtcctcgatgagcgagatcgtgccgtgcttgagctcgccggaggcgtaggcctcggagtggatgtagctgatctccttgagcttgagcgagccctcaagtccgagcgcatagtcgaggttgcggccgatgaagaagacagaattgtggttgaaatactgggaagcgtacttggggatggcctcgcagctttcgctcgcgaggaactgctccatcttctccggcagcttctgaagctctgcgaccgcctcgtcgtactcctcctttttcaccgtgccgagcacctcgccaaacgcaagaccgatcatgtcgagcactgcgagctgcgtggagtaggcctttgtcgtcgcgacagcaatctcgggaccggcccaggtgtagagcacgtcgtccgactcgcgcgcgatggacgaaccgaccacgttgacgatggagaggatatagccgccgcgctttttcgcctcgcgcagcgcggccatggtatcgagcgtctcgcccgactgggagatgacaatgacgagcgacttatcgtccacgatggggtcgctgtagcggaattcggacgcgagcacaacctcgacattgcggcgcagcagatgctcaagattgtacttgccgatcatgccgacatgatacgaagagccgcaggccacaatgaaaatgcgggtaaatttgcgcattttctcgacagggagcttgagatcgtcgaagacaaccctgccgtccttgatgcgcggggagatcgcgcggcgcagcgcctcgggctgctccatgatctccttgagcatgaagtgctggtagccgcccttttccgcggcggagacctcccagtcgatggtaaagtgcttcttttcgaccttctgctccagcgcgtcgtagacctcgatgccgtcgcgcgtcagtacggcgacctcgccgtcttccatgtaggcgacgtcgcgcgtgtgcttgataatggccgtcacgtcggaggcgaggaagttgcagcccttgccgtagccgagcagcagcggcgcatccttgcgcgcggcgatgatgcggtccgggcagtcggcgcagagcataccgagggcgtaagcgccctcgatgcggcgcagcacgcggcccacggcctccaaaaagtcgtggcactcgttgtagtagaattcaagcagctgcgccacgacctcggtatcggtctcggacttgaactggatgccctgaccgatcagaaattccttgatctcgacgtagttttcgatgatgccgttgtggatgacggcgaacttgccgttttcgctcacgtgggggtgagagttgatgatgttcggcgcgccgtgcgtcgcccagcgggtgtgaccaaggccgatgcagccctcgaggtccgcgccgccgtggatctgttcgctgaggactttgagccggcccaccgctttttcgacctgcagctttccctgcgccgagatgacggccacgcccgcggagtcatacccgcggtattccagatgcgcgagcccgtccagcaggatgggggccgcctgttcctgaccaatgaatccaacgattccgcacatatgataacattctccttttgatgatttttgaaaaatgggcaaaaatacccctttgcggcgcaaagccgcttcgccaaaaggacaaatgcgcagtcatttgtcgcttttcccgtggtcacagcccctttgttctgcggtcgcccgcatgtttgtcggctgtgtgcgcgcccacgggcacggggaagcatccgccgaaatttcgatcctcttcccacctcgtcgtcccgccaaaggcgggcgctggcgcttatgatggagaaactccatagctcctttcacttctgcgattttgatgtatttcaaaccggacttctccggatgaaagcggttatttcgcccctccgcggggcaaactcccaaaaagggaggatgactatggctactgcttttatccgcacgatcgtgctctattttctcatcatggtcgggctgcgccttctcggcaagcggcagatcggcgagctcgagcccatcgagctcgtgctcacgctgctcatttcggaccttgccgccgtgccgatgcaggattttggcatcccgcttttaaacggcgtcatcccgatcgtgacgcttttgtcgctctcgatgctgctctcgtgggggagcgtgcgctccatccgcctgcggcggctgatctgcggcagcccgacggcgctcattttagacggcaaggtgcagcaggacgcaatgcgccacaaccgcttcacgctcgacgagctcatcgaggaactccgctctcagggcgtgacggacctcacaagcgtcaaatacgcggtgctcgaaaccgatgggcagctctcagtcctgctctatcccgacgagcagcccgcaacgcctaaacagctgggaaagcccgtcaaggacgacaccttcctcccgcatatcttcatcaatgacgggcgggtactgggcgaaaacctttcgctcgcgggtttagacagcgcatggctcgacaaaactgtgcgtgcgcagggctaccgcgcgccgtcggagatctttctgctctcgctcgacggcgcgggcaaaattctgtgcatcggaaaggacagtgccaaatgaagcgatttttctggatcccgttctgcctgttgctcgcgctctttggcgcggcgctcttgaatgccgccgtcgccgacggtcttgtcacagactggtgcgcggagctcgacaaattgcaggacaccgcgcaggcggagaactgggacagcgtgcgcgatgatctctccgcgcttcacgaaagctgggacgcgcacgcgacgtatttccacatcattttgcagcacgacgaactcaatgaggtcgagtctcttcttgcccgcgcagacagtttcgccttcgagcaggacgaggcggaattccgcgcatgtgtcgccgagcttcagtcccagcttcgcgtgctgtctgaaatgcaggagatctctatccccaacattctatagcgcttttacttgctttcaagcagcttgttgagttccttcataaatgtgtcgatgtccttgaactggcggtagaccgaggcaaagcgcacgtaggccacctcgtccacggcgcgcagcttgtccatgacgagctcgccgatgtactcggtgctgacctcgcgctcgagagagttctgtaacgtctgctcgatctcgtccgccttctgctcgagcacctcaaagggcacggggcgcttttcgcacgcgcggatcatgccgttcaagaccttgcgcttgtcaaagctctggcggctgccgtcctttttgatgacgaccatcggcaggctctccaccgtctcataggtggtgaagcgcttggcgcacgagaggcactcgcgccggcggcggatgctgctgccctcttcggcagggcgggaatcaatgaccttgctctctttgtatccgcaataggggcatttcatcgtgcagaacctcttttctcatcttagtcagagagagtatagcatactttctttcgggatggtagacataatttgcattttttcacaggatgggcgaatttttctcatccacgcggtagatgacgcactttctcccgccgaccgtcccgatgcgggcaaggcagaagagctccgccagcgggaacggcgcgttctcgctgtacggcagcgccagcagcttcccgcgcttctcctcgcgcaccatcgcgccggataacagtgagagcgcgcagtcgagccgcgccgagcggaaaaacgagccgcgcggcaatgctttccagtcccccaccgctctcccctcctgtcggcacaaaataaagagcctgtgctatttctatgcacaagctcttttctttatgtagggattttactgcacgctgtaattgccgcgcacgagcagctttgtgctgttcgcgctcgcctgcacgcctcggctgtcgaccgtcgccatgtaaaggtggttctgctgcaaggcaaggccgcctgcaagcgccgcgcccgacgtctcgtcgatgagccccggggtgctcgccgccacgcacacgccgctgcccgtgcgcagcatcgcctcgcagccgacgcccatgtacagaatttgcccctgattcagcgtgatgaccgtaaagctcatcgccgtgccgccggaagtattaccgctcgacgcaccgtacttctgctcgaaagcctgcgtctcgctcttcacctgctcggtgagcttactcgagagcgtctgttcgcgcgaggcagtcttcttgtccacctcggagaggatctgcggcaggaatttttcatttaagtagctcagcgtcacgagcgggtcgctgctcgtgcccgcgccgccggtcgcggcgacagtcagcgtcagcaccgttgcgctcaccaaaagcagtcccaccagacgggcaaaggcgttgtttctctttttcatgctgtattcctcattttctccccggcgcgcactctttctgtgcgcgccggaggggttagactaattgtgtgttctgtaatccgaagctcacggcgatggccgcgtcgatgcgctccatcagctcgccgtccacgcgccccatgcgctcgcgcaggcgccgcttgtcgagcgtgcggatctgctcgagcagcaccacgctgtcgcgcggcaggccgtagtccggcgcggagagcgcgatatgcgtcggcagcttcgccttgttcgtctgcgaggtgatggccgccgcgatcaccgtggggctgtagcggttgccggtgtcgttctgcacgatgagcaccggacgcacgccgccctgttcgcttccgaccacgggcgagagatcggcgtaataaatatcgccgcgtttcacattgatatccacttagctattcacactccgagcggaagaagtaccctttcaggggccactgtcattctcccacgcgggggcggaatttatacgggggctcgcaactttccccgtctttctgcccccagtccatcgtatgctgaggacagatgccgcgtgcttttcttaaagcggctgcaaattcttgtcgacgggtacgccgtttaagcgatagacgcgcggcacacgcttgctgaccgcgcacatgagctcataggggatggtatcgcagagcgcagcatcgtccgcgcagaggatgtgctcgccgaagatctcgacctcgtcgccggacttcacctgcgggaggtcggtcacgtcgatcatgcacatatccatgcagatgcgcccgacctgcttcgccctgccgtagggcgtgagcacctcgatctgattcgagagcgcgcggtgcaggccgtcggcgtagccgatgggcaggaccgcgatgcggctgggccgctgcgtaaagtatgtgcgcccgtagctgatgggctcgcccgcagcgaagtccttgatcgtcgccacgcgcgttttgagcgacatgacaggctgcatgcccatcttttcggccaagtctcccgaaccgtagaggatgatgccgcagcgcaccatgtcccatgcccactcaggatagctcgcaatgccgccggcattgcagcagtggtggagctggaagcggaagccgctttgcgtttccaccttttcgatcatgcgcgcaaagcgctcatgctgcaatttcgtaaaggcgacgctctcctccgtgtcctcgtccgacacgctgaagtgcgtgaacacgccctcgacctcaagtccgggcaacgagagtacgcgcaggatctcgcgcagactctcgtcaaaatgcgcctcgtcgcacgaaaagccgaggcggcccatgccggtgtcgagcttgatgtgtacgatcattttcccgcccagcgcgaccgcgcgttcggagaattccttcgcgatggcgtagctctgcaccgcctgcgtcatatgaagctgcaaaatgcgcgccgtctgatccgcgggcgtgaagcccagcattaagatcggcagcgtcacaccgctgtcgcgcagctcctcgcattcgtcgatgttcgacacggcgagatagcccgcgccgagctgctcgagccgcttggcgatctccaccgcgccgtggccatagccgtctgccttgacgacgccgagcagcttcaccttatcgccgacgtggcagcggatgacctcgaaattatgggtcagatggtcaaggtcgatctccgcccaggtcctcttgagcgtgctttccatagacgcttccacccttttgctttcagtttcgacgcgcgctattgcgctgcgtccggcgatagtatatcaccaaaaataaaattcgtaaactccgccgcggcaataattttgtcattttccgcgatctcggcgtactccggcgcgccggaggcaccaagccagagcgagcaggcgaacgtttcgccgctgagcgtcagtgaaaaatcggcacgcagcgcatcgacgtctccgatcgtctccgcgcccgagctgtcgagatacaccttcgggaagttttgcagcacgagcggcacgcagttgagcgcactcacgcgcggcgaaagcgtgcccacgtccagcaccagatcgtcgaacgtcagcgtcagcttgtcgccctcaagcaccgcgccgacgcccgtgagctcctccggctcgctgacggtcgcgcgcacggcgtcgccctgcgcgctcagatgcagggcatagacaagcgtctcgtccccgcgcggcacactgacgcgcacgtccgtttcgtaggatgccaaatttttgtactgctcctgcatcgcctccgcgcggtcggtctccttgccgcaggagcacaaaaaaagtaagcaaagcactgcgggccatacctttttcatatcttcatcccccttcgtccgttatctctatgcgcgcgcatgcagcagcattccagcttttcagagcacagacagtcaaaggcatatcctaccggcaaggttgcacttttcgcagctgcacatctgccggttctgtgccatccccgaaaaaatattttgcacatagagttgcacaccacacttcccgcggaacgcaaaaaagaggaagctgatttctcagcttcctctcgaaaagcgcttgatttgtaaggggtttcggcttacttgaagtaacgctccagcgcgtcctcacaagctacatatccttcacttcggcataaatgccaaagctcagttatttcgctgctcgtccttctcccattaaccccgcttcgctgggctttgatgggaaccctggtttacttgaaatatctttcaagtaaacccttgagggcgcggccgtgacgagcctcgtcgcgggccatctcgtggacggtgtcgtggatggcgtcgaggccgttcttcttcgcgcacagggcgaggtcaaacttgccgctcgtggcgccgaactcgcagtcgacgcgccacttgaggttgtccttcgtgcttgccttcatgttgggctcgaggtcggagccgagcatctcggcgaacttcgcggcgtgctccgcctcttcgtaggcggccttctcccagtacaggccgatctcgggatagccctcgcggtgcgcaacgcgcgccatgcagaggtacataccgacttcgctgcactcgccgttgaagttggccatcagctggtcaaagatatacttcttgtcctcttcggagatgtcggggttgttcttcacggtcttgccgtaaacgccgaattcgtgctcggcagcgagcttgagctcacccttgacctcttcgaacatgttgctcttggcgtggcacacggggcactccgcaggagcctcggggccttcatagatataaccgcaaaccttgcaaagccactttttcataattgctacctccataaagtttatcttgaaatgtgaattgttttgcttgcctttcactggcgttagtctaccacattttaccggttttatagaagttgcaaatgcaacattttgatgaattttttatgaattgcgctccatggccttcaggatgcgaggcgcgaggatcacactcacgacgatcttgaggcagtcgccgggaagatagggcagcatgtaggccgtggcgagcgtcatcccgctcacgttgccgcccttgtagacgttgacgatcagcgcgatatagggaaggcccacgaggtacagcaccgcaaggcctgcaaagcacgcgagcagaagccgcggcacggaacggtccttttccgcgatcttgccgatgacccacgccgtcgggatcaggcccagcaggaagccgaacgtggggttgaagatatagccaaagccgccgcccgccgcgaagatgggcacgccgacaaggccgagtaccacgtagagaagttgcgacagcgcgccgagctttgcgcccagaagcaatcctgccatcgccgtgaagaagaactgcagcgtgatcgtcgcctggaaaagctggaagtgcaggaacgcgccgatagccgtcagcgcggcgaacagtgcgcagtagatcaggtctcttgttttgatgtttttcatggtgattctcccttttctcaaaaaactgggctcatcataacatgacgcccgcccattgtcaaccagtaaattcataaaggtttacaagtttgcaatttttcttgcacaagatcaaaatcgcagcgcctacgtcgctgcacgaatgaaggggggccattctctttccgcggaaagagaatggccccccttacaccccctaagagaaagggattagattggccgtctcggacttgaatgaccttcatgcctccggaatgcaacttcctgcgcgcggcgttgccgcgtttgcctctgctatacgatttggcctactcctattatccgctgccgctctgctgatcttgtaggagtgcagactaatatccgtctaccgcggcactcctcaatgcggcgagcgcagcaatgccgcattcggcaagcagtctgccgccgaggtaacgtcactcgcgcctcacgatagtaaggcgcggttgctgaatgtttcgaattgcagtgattcatggcgaagccatgtacaccgcacctgattccgcaggctgcgcagctcttcaagccccagatctgcaatgtcgggggtcgagggggacccccctcgtcctttctcttgggggtgtaagggggatattctctttccgagaaagagaatatccccctttgccgcgtccccacacgctgtggggacagaagcagcccccccacgctgccttcaatacttcttattgtagtaccaataagtcccacaaaaaatgagcgactgcgcgcaggtcacaagacacaacacctgcccgatgattggctgcttgaacactaaaagcgccagcagtcccgccgcgagctctgcgtagacgcagatgaaaaacgtcatgctgcgcgccttattcgcaacatacatcgtgcgctcatccttgagcatcgcgtcataatctgtggccttttccgggtcgcggctcaggcggtaaacgcgcagcagccgcaccgcgccgcagacaaagaggccgcagccaaggccgctgtaaaaatcgcccatgtgcgcatcaccgagcagaaatccgatggcgaacatcacgagcccgatgacggtcaccagaatgccgcactttttctgctcctgcaaattcatgcccctcaggaatttcaacttcatgcttcttcctcctcaaaaatgaaaatatcctcaatctgcgcgccgaacagctgcgcgatgctgtgcgccagcaggatggacgggttgtacttcccgttctcgagtgaaatgatcgtctggcgcgagacgccgagttccgacgccaactgctgctgcgtcatgccgcgcgcctttcttctctcttcaatgtggtttttcatcgcttctctccgttttctaaagtcaagcttgctttacatccgtgaggatagcaccgcgtgagcgaaatgtcaagtgtcttttacatttttttgcattgcttttgttcctgcgctttgctacaatgagtgttaagaaaattttcgcaggagggttcttatcatgtccgtcaagatcgcaccgtccatcctctccgccgactttgccgagctcggcgccggcgtcgaggccatttctaccgccgactacgtccatttcgacgtgatggacggctgctttgttcccaatatcagcattggtatccccgtgctccagtcgatccgcaagcgcacggcgctgcccatcgacgtgcacctgatgatcgtgcagcccgagcgctatgtcgaccagttctgcgacgcgggcgcggacctcgtcacctgtcatgtcgaggccgacacgccggagaagatccacctcgcgctcgacaaaatccacgccaagggcaaaaaggccggcgtcgtcttgaagcccaacacccgcgctgaggccgtgctgccgtttcttgacaagtgcgacatcgtgctcgtgatgaccgtcgagcccggctttggcgggcagaagttcatggccgatatgatgccgaaagtttccgccatccgccgctacatcgacgagagaagccttgactgcgagctcgaggtcgacggcggcgtcgacgccgtgacgtgcaaaacctgcatcgaggcgggcgcaaacgtgctcgtcgcgggctccgccgtctacaaggccgcggatatccccgccaagatcaaagagctgagaggttaagtccatggaatactttcccgcggcgctcgaaaagctcgttgagcagttcgcgcgcctgcccggcatcggcagcaagagcgcacagcggctcgcgtttttcgtgctgagcctgcccgaagaggaggccaaggcctttgccgatgccatcgtcgacgccaagcacaccgtcacgttctgccccgtctgccgcaatctgacggacggcggcctctgccccatctgctcgtcgccgaagcgtgatgaacatgtcatctgcgtcgtcgccgacccgcgcgatgtcgtcgccatcgagcgcgcgcgcgaatacaacggccgctaccacgtgctgcacggcgtcatctcgccgatgaaccatgtggggcccgacgatttggagattaagccgctgctcgaccgcgtggcgcaggggaacatcgaagaggtcatcatggccacgaaccccgacactgagggtgaggcgacggcgatgtaccttgcccgcctgctgcggccgttcggcgtgcgcgtcacgcgccttgcctacggcatccccgtcggcggccacctcgaattcgccgacgacgcgacgctgatgcgggctttagaaggacgtcgcgacatataaaaagcaaaaaaggaaggcgagtccaaatggactcgccttcctttttgatttctttacatcattttcaccgtgtagtacaccgcgaggaggaacgtgccgatcgccagcacccagaggccgtagtaggcgatgctgctgacggcgagcgccgccacgatagccagcgcacacacggcgagcacagcgtaaatgagcttatagtcgccgtcctgcgacacgatgcgaagatcgccgagctttttaagcttgccgtcgttcttgcccgccttgaaaacagcgacaccaagcaccgcgaccacgcagatcgcgaggatgctgcatccggtgacgatgccgccccacgtgtcgctcccgctgccgcggtggatgaggtacatcgccatcagcgacgccgtcaggcccacggcctgcacggaaaactcacgcggatagagcaggaacacgatgccgatgagcatcacgaccggcacgatcacgcacatcatcgtcgtgccctgcgggtagaccttgagcatcaggatcgacgacacggcgaagaaaaagccgatgcataagagccacggcgcggcgggcgcgaagcgcgtccactttttgcgcatcagccagacgacaaggcccgcgccgaacagcgcgcagccgatgtagtcgatgacctgaagcacagtcatcatcgtgagcacctgaccgacgccgcctttgacatagtagttgttcaccatcaaaagataaaattcagcaatgacgccggccatgagcaccgtgatcgcacgattgacgttgcgattgcttctggccatgcgttctgcccgcttatcgttgttttttgccatctatccaagcctccaaaaaaggttgtcgttttgtaagcgcctgcatcaggcggaaacattacatcatagtataatagcagaacttcccccgtttggcaagggaaaattcttattcttgtgccagatactccctttttgcaccgcgcttgcttttcttttgcacaggctttataatgtttcgcatgcaaaaaaaggaggttttccccatgtccaacgtttcgatcaagctgctgcgcgagggcgcaaagctccccacgcgcggctccgctttcgccgccggctatgacctttacgcctgcctggacggcgacaaggagctcatcatcccgccgcacgcgacggctatgctgccgaccggtctttcctttgccctgccggagggcacgttcggcgcagttgtcgccagaagcggcttagcttccaagcaaggcctccgtccggcaaactgcctcggcgtcatcgacagtgactaccgcggcgaatgcttcgtcgccctgcacaacgacagcaacgaagagcgcaccgtgcgccacggtgaccgcgtcgcccagctcgtgctgctgccgtttctgccgatggaatttgagcaggtcgacacccttcccgagaccgtgcgcggcgaggggggctttggcagcacagggcgctgactcagagcacgaacgccccgtccaccgcgagcacctggcccgtgacgaacgacgccttgtcagacgcgagatacgcgaccgccgcggcgatgtcctcaggcttgccgaggcggccgagcggcgtttgctcggcaaggtccttgagcgtttcctcgcccagtaccttgaccatatcggtctcgatgacgccgggggcaacacagttgacgcggatgccgctcggcgccagctccatcgcgagcgagcgcgtcaggccgatgagcgcgtgctttgtgcaggaatacgtcacctcgcacgacgcgccgtgctggccccagatcgacgaaatgttcacgatgcagccgctcttttcgtgcaacatgttcggcagcaccgcctgaatggtgttgcgcgcaccgtttaagttcacgccgaagtaacgctcccacatctcgtccgtcacatcctgaaagagcgcctgaccggcgacgcccgcgttgttcacgagcagcgtgatcttaccgagctcgcgctcgcactgcgcgaccatggcgttcacctcgctgcgctttgacacgtccgcctgcacggcgatggcctcgcggccttcggcgcgcagcagcgcgacaagctcgtcggccttgtcctttcgttcatagtaattgatgcacacggcatagccgtcccgcgcgagctccgccgcgaccgcgcggccgataccgcgggacgagccggtgaccaatgcgacctttttcatgtgtttgcctccgtctgttgtcaatgatctgtctcattataatttacataacgcaaaaatgcaagcaccgccgcctttttgggcagcggtgcttttttccatgcgctcagagaagcggcgcgatgtaatttgtccatagggcgctcagcggcatcacgagcaccatcgccgggatcatgtccgccacggggaagtcctgcatcttggcgatgcggcagcccgttgcgatgagcagaaagccgccgcaggccttgaagtcgccgatcatcgtcggcatcgtgagcggatagatcgccttggcggcgaaaaacagcgcaaaaaacaccgccgcctgcggcaccgccacgagcgatgtcaccgcgcccaaattgcaggcaaagaccatcgccgtgaaaaagtccaaaatcgacttgctcaaaagcaccgtcgcgtttcccgtcatgcccgcgtcaaggcagccgtaaatgcccgtgccgctcgagcagaagagcacgatggccgccaccagaagcgagaggtattcctcgcgcggaaggccgccctcgtcgtccccgtttctctcgccgaggagcttgccgatgggcttttccatcagttcgccgccgcggctgatccactcgcccagatgacacgcaaggccgagcgccgtgcccgccacgacggccaggatcaccgcgggcatgttctgcatcagcggcactgagctgatgcccatgccgatggcgcacacgccgaacaccttgttgagctctgtggtaaagcgggtggagagcttcttgctgaacaccgttcccagaacgccgcccagcgccaccgccagcacgttgacgatcacaccgatcattttatctttcctcctgacacacaaacacaaaaagccgccgaaccgggctttccctgttcggcggcgctcttgatcttgtattaagataacgcaaattttttcgcctgtaaagatttttccgcagctttcctctgatcgtggaaactttttctctttttctgcgacttgtattttggagggtgcagcagagataggcgcattcccctccgccctcttgaccccccatttaaacatttcgtatactaaaagcgagcattttcccctacttaaagagagataataaggagagaacactatgaattggaaagagaccctgaacccgtatatgtcgacggaagaagcaacattttacagacgttttctgcacattctgaagcacttcctcatcgtgatcgtaggcggtgcatttttcacccgcatcgtattccgtacgttcctttttgaccatctccacaatccggatatcgtctgcgctattctctacgccgcctttgtcctcacctgcatcctgaccgccgaaggcaaaccctcgtcgcccaaagacgataccaccgccgaacaataatcgccatcgcaaatcgcccctacggggcaacagcgcttcacgtttccaatcgacgcatcagccatcatcaggactgcacccccatcgcgaattgcccgtcagggcaagagcaccccgcagtcccaatcgacgcagcatccatcgtcatcagtcccgcactccatcgcgccttgccgctccgcggcaacagcgccgcgcactcccaatcggcgcaggcactcctacccacaccgttccctcggcgcttttgcgcagggcgaatttacttcgcccaagcattttaatgttccacgggttcctcgcgcgaagtcgcgcgtcaattcgcagcgcagcggagaattgttataggcggaattcacttccgccgttaaataatttgaatcaagccgagacgcgctccgccgcgtcgaggctccggcgcttttgcgccgtaaaatgcttttgctgcgcaaaagcatttgcacaggggcaattcacttgcccctgtgctttttaatgtcctacaggttccaaaaaagggagacacaccacacggtgtgtctcccttttttggagcagggtacgggagtcgaacccgccttaacggcttgggaagccgctgtaataccgatataccaaccctgcgaacggatggagtatatcatattcttcgtgtcatttcaaggtgaaatattcatgttgtcgctgattctttcatattctttgccaaacgaagaaaggagctccgccatgaaacgaatgttcccgatgatcctgctgttcgcgctgcttttgtgcgtgcccgtgcgcgccgacgagctcacgctcgacgccccctccgctctcttgatggaaaagcagaccggcatggtgctctttgccaaggatgaacacacgccgcgcgagcccgcgagcgtgacgaaggtgatgacactgcttttaaccatggaggccatcgactccggcgcactctcgtatgacgataccgtcacaggcagcgcgcacgccgcatcgatgggcggcagccagatctggctcaaagagggcgagcagatgcgcgtcgaagacctcatcaaggccgtgtgtgtcgtctccggcaacgacgcggccgtcgcgctcggcgagcacttggcaggcagcgaggaagcgtttgtcgcgcgcatgaacgagcgagccaaagagctcggcatgaacgacacgcactttgtcaactgcacgggcctgcccgcggacgggcatgtcacctcggcctacgacatcgcgctcatgtcgcgcgagctcatttggcaccaccccgacatccgccgctttacgacgatctggatggactcgctgcgcgacggggcatccatgctcgtcaacaccaacaagctcgtgcgcttttatcccggcgcgacaggactcaagaccggctcgaccgattcggccaaatactgcatcagcgcgaccgcggaaaaggagggcatggagctcatcgcagtcatccttggcggcagcacgagcgacaagcgctttaccgacgccaaggcacttttgaattacggctttgcagcgtactcgctcgtcaccgtcgcccccgagtcgccgctgcccgcggtacccgtgacacttggcacacagaagacggtgcaaagcgttctgacgagtgaaaacgccctgcttctcgaaaagagccgcgcaaacggcctgacgcaggccgtctcgctgcccgagagcattgatgcgcccgtcgaggagggcgagccgctcggcacgctcgacattttcgacgcaaacggcacaccggtcgcatcgcttccgctgctcgcgggcgagagcataccgcacctcacgtggggcgagcttttctgccgcctgctcaagctcgcgtactgcggggtataagttctctccgtttttcacaaaaatcgttccaaaatttttccgttttacgctcatgcgtataatttttagccatttttcggcaaagcatgcttttcttgcttgacagaatcgaaaaaaggtgtatactgcaaacaatttcataagtcttgatagaggcgcggctgacatgagtagcccccgacaaaacggcaggagaccgtggggtgcgaaaggggacgccgccgaagggtcgataaaatccctgttttgtcgatacttgggtcgtcgggaaatacccggcggactgtcgtccggaaggacggagtgctgtcatgatcgacgcgatcaggagctttgatgtgtttcacatcggttgtttgatgtttttgtgttaagtcatgatggaaatcatggcttaatttttttgctctgtgtttgcggcacaggaaaggagaaacatcatgcaatttgtcggaaccttctgggcgctcgtgccccccatcatcgccatcacgctggcgctgatcaccaaggaggcgtactcgtctctctttatcggcgtcgtgatcggcgcgctcttcgcctgcgactttgcccccgtcgccacgatcgacatgatcgttaacgatggcatcatcgccgcgatcgcggacaacgcgggcatctttctcttcctcgtcctgctcggcatcatcgtggcgctcgtcaacttagcaggcggcagcgcggcctttggccgctgggcggaaaagaacatccacacccgcgtgggcgcgcagcttgcgacgttcatcctcggcatcctcattttcatcgacgactactttaactgcctgaccgtgggctcggttatgcgtccggtcactgaccgccaccagatctcgcgtcccaagctcgcctacctcatcgacgccactgccgctcccgtgtgcatgatcgcgccgatctcgtcctgggcggccgccgtgtcctccacggccgaagaccttgacaccggcatttccggcatccagctcttcatccgagccattccctataacttctattcccttctgacattcgtcttcatcatcacgctcacgctgctcaagttcgactacggcccgatgcgcgggtttgaagagcgcgcccgcaatacgggtgacctctccggcagcgccggcagcaccgaggagaacgccaaccccaagggccgcgtcatcgaccttgtcattcccgtcattatgctcatcatcctctgcaccatcggcatgctctacgtcggcggcttcttcggcgctgacacgtccggctgcaccgattacgccggcgacttcatcggtgcgttcggcaacacggacgcgttcgtcggcctcccctggggcggcatcatcgcgctggtgctcacggtcatctacctcgtcgcccgccgcgtcgtcggcttccgcgaggctatgggctgcatccccaagggcttccaggccatgatctccccgatcatcatcctgacactggccgtctccctcaagaccacgctcaacgcgctgggtgccgcagactatgtgcacgatctgatgtacgctgcctctgagggcctttacaatatgctgcccgccgtcatcttccttgtcgcgtgcgtgctggcctttgcctccggcacgtcctggggcacgttcggcatcctgatccccattgtcacagccatcttccccagcgacagcgcgctgctctacatcggtatttccgcctgctgcgcgggcgccgtgtgcggcgaccactgctcccccatctccgacacgaccatcatgtcctccgccggtgcgcaggtggagcatgtcaaccacgtcgccacgcagctgccctatgccatcacggtcgcgtgcctgagctttgtgtgctttgtgctcgcgggctttatccagaactggatcgtctgcctcgccatcggcgtcgtgctgacggtcggcacgctcttcgccattcgcaatgtcgaggcacggaaggcgcgcattaaggattaacttgctctccactctcttttctctcataggaacggggcgaaccggtcggttcgccccgttccccttatattctccgctttgcaatccctaaaaagcatggtatactgagtataacacttaacttcggaggacgtttccatgagtattgtcgtgatgggcgcggtgtttgtcgatatcaagggctaccccctctcttcctacatccccggcgggcgcaacgcgggccgcgtcgtgcaggtgcacggcggcgtgagccgcaacatcgtcgaggacatcgcgaacgtcgagctgcggccgacattcgtgagccttgtcgacgacacgagcgcgggcgcggacgttgtcaaaaagctccagagccacaaggtcgacacgcgctacatccgcacaacgcccgacggcatgggcacatggctcgccatcttcgacaacacgggcgatgtgaccgcgtcgatttccaagcggcccgacctgagccccatcgccgatatcctcgatgagcagggcgacgaaattttctctcaggccgacagtatccttctggagattgacatggaaaaggacatcgtcaagcgcacgttcgcgctggcggaaaagcaccgtaagcccgtctacgcggtcgtgtccaacatgagcatcgccatcgagcggcgcgactttttgcgctcggtgcactgcttcatctgcaaccagcaggaggcgggcattctgttttcggaaaattacgacggcctctcgcccgacgagatgctccccatcctgcgcgacaaaattcgcggcgcgcagatccaccgcatggtcgtcacgatgggtgcgcagggcgcggtatttgccacgctcgacggcgaggacggctactgccccgcgaaaaaggtcgacgtcaaggacacgaccggcgcgggcgacgcgttctttgccggcgcggtcatcggccagacctacggcaaaacgatgatggaatcctgcgagatcggcacgcgccttgccgcgtccgtcatcacgacgggcgaaaacgtctgcccgcgctacctgccgagcgaattcgggctggacgtctccaccgtcgacgacgcgcagatcgcgctcgagctttgatcccggcacctattaaatacagtaaaaagcgagggacgctcacgcgtccctcgctttttgttcctttttttactttccgcacagctgcgcacggttctcgtccgcaaggcgcagcgccgcgtcgcggtccacgccgtaggcaaagcggaacgcatacggctttgtcatcgtgatcgcgctcaccgtgccatctttcaggtaaaacgcaatgtcgcggacgtcatagtttccgtcgtcctgcggcgtctgcggctgccagacgtaggcgcggtcgaagtcatacgcaggctcactgtagccgctttcgtcgctgtagccgtcatagagctcggactcgtctgccgcgatgcagtaaagcgcttccgggtattccgtcagcagcgctttctcgctgtcgccgaccttgacgccgcgcggcgttcccacgcccacagcgccggtacgcagatagctgatgacctcgcgccctgtttcagggtagtaatccgtcccgacgacgagctgcgcgtccgcatcgtaatggcgcgcaaagtcatagggcagcatcccgtcgctgtcgtaggtcgtattctccgttttcccgttcggctcgtagtccgccccaaggctcaggaaaccatccggcagctccagcgtaaagttcgcgtccggctgcggctcgatcgtcaggtctttctcctgcatcaggggttcgtccggtgcgccgtccggcgtttgctgcttttctccgcagcctgacaccaaaagcgtcagcgccgccaacagtgcaacaagcaacagtccggtgtttcttttcatgttttctcctttctcacggctctcggcccttatgcttccttcagcttctcttccagcagtttgaaggcttcatccgcggcttcctcgcgaatctctgcgcgggactttacgccgaagtcaaagcgctcggcgatcgtctcctcggcagaggaaaatccgataaacaccgtgccgacgggatttccccgctcgtcgcggtcgggtccagcgacgcccgtgacgctgacggcgcagtccgccgtcgtcgccttgcgtgcgccctcggccattgcgcgggcgacgggcgcggacaccgcgccgtactcttccagcatgtccgccggaacgccgagcacgcggtgcttaacgatattcgtatagctcacgacgccgcccatgaagacgcccgacgcgcccggcacatccgtaatgcgcttggcgatgagaccgccggtgcagctctccgccgcggcgaaggtcacgccgcgcgccttgagcgcttcataacagcgctgttcgactgttttttccgccataataagacttcctttcagaacttgatgcgcacaaattcacggtttgtcatcgcgcggtcgataaggccctcgatatcaaggacagcctcggcctcgcggacctcgtcgaggttcggcttcgtgcgcggatggcgcggggtgaagaccgtgcagcaatcctcgtagggtaagattgatgtgtcaaatgtgccgatttttctcgacagtcgcacgatctcttccttatccatgccgatgagcgggcgcaggacgggcaggtcgaccacgtcctcggtcacgcgcagggcctccatcgtctgagacgcgacctgaccgaggttctcgcccgtgacgagcgccttggccttcacctgttccgccacgcgctgagaaatgcgcatcataaagcggcgcatgatgagcgtgaagaactcctcggggcagtttcttctgatctcctcctggatctcggtaaacggcacgatctgcaccgtcagccgcccgcaccaggggactaagagcttggcaagggaaagcaccttctccttcgccgcgtcggaggtgtatggcggggagaaaaagtgcaccatttcgagcttgacgccgcgcttggcgatcatgtaggacgaaacgggcgagtcgatgccgccggagagcaggctcaccgccacgccgcccatgccgatgggcagaccgcccgcgccctcttccgcggggccgtggacgtaggccgaatcgtcgcgaatttcaatgtggacgacgagttcggggtcgtggacgttgacctcgcacgtcgggaacgcctgatgcagcgcgccgccgacctgctgggaaatctggatggacgtcaaggggaaggtcttgtcagcgcgcttactctcgaccttgaagctcctggccgtgcgcatctcgcacgcaaggtaatttttcgccgcggcgatgatcttctggacgtccttttcgcacggcagcgccttcgaaacggcaatgatgccgaagaccttcttgcagctctcaaacgcggcctcgatgtcgcactcgtcgtccttcggctcgacgtagatggtgctctgcttggagtagacgcggaaattgccgcatttcgacacgcggcggttgacgttcgacatcagcttatcttcgaagctgcggcggttcaggcccttgagcacgacctcgccgagcttgcacaggatcatttcatgcattggtgttgttctcctcatttattatggccgcccccgcgccggcggaagatacggctgaattttcgttggtttcggatttggcaggctttttccctttgcgggtgagccccagtgtaaagcacagcggctcaacggcggccagcagggcaaagagcgcatagctgaacatcgtgccctctccgctcaccccgttgatcccgaccatggcgggcgccatcggcagctcccagatcatcgcaaggatgctccccgagccgaacgggacaggcatcacaagaagcgaggcaagattcagcacatagagcacgatcgccgcattccagcagcaatttttgttgatgccccgctccggccgcaggccccagccgaacaggaaagaaagcgccgacacatagacgacgccgagcgcgagcccgacgggcgtggcaaacgtaaaggacgaggtcgaccccgtgcctccaaacgccgcgaacaacaggataaaagccgccccttgggcgatatggctcaaaatggaaagcgcgccaaactggatgtagtcataccttttcatctcattcacccctgtaaaatatccgtgttgcggtactggatggcctcggccagatgatgcgcctcgatcttctcgctgccgtcgaggtcggcgatcgtgcgcgcaacgcgcagtaatctatcgtggcttcgcgccgtgaggccgaggcgctcgaacgcgcctttgagcagcttttcgcccgcggcgtccagcgtgcagaactcgcccaccatcgcgggcgtcatttgcgcgttgcaggtgatattcgtgccggaaaagcgctgcttctggatgtcgcgcgcggcgttcacgcgcgctttgacgtcggcggaggactccgccttttcgcgccggcgcatggcttcgaactcgacgctcggcacgttgacgtgtaagtccatgcggtcgagcatcgggccggagattttttcgacgtatttttccacctgctgcttggtgcagtggcagcgccccgaggggtggccgtaccagccgcagcggcaggggttcatcgcgccgacgagcatgaagcggctcggcagcgtgatactgcccgcggcgcgggtgatggtgacctcgccgtcctcgatgggcgcgcgcagcacttcgagcacgtcgcggtggaattcggggagctcatctaaaaaaagcacgccgtggtgcgcgagcgaaatttcgccgggcttgggcgtctgcccaccgccggtcatcgcggaagcggagagcgtgtggtgcggcgcgcggaacgggcggtgcagcagcatcgggtgcgagctgtcggtcaatcccgcgactgaccagatctcggtcgcttcaagtgcttcctttcgcgtcatgtcgggcaggatcgacggaagccgccgcgccagcatggatttgcccgcgccgggcgagccgatgagcaggatattgtgtccgcccgcagcggcgatctccagcgcgcgcttgacattttcctgtcccatgacgtcggaaaagtcggggccggtctcgctcgtctgctccgcctgccacttcggctggggcgagagcttcttttcacccttcaaatgctgcacgagcgacacgacgtccggcacgccgtaaacggtcacgccgtcggcaagcgtcgcctccgctgcgttcgccgcggggacgtagagcgtcctgatgcccgcgcgcaccgcggccatcgccatcggcaaaacgccgttcaccgcgcgaagcgtgccggtcagcgagagctcgccgacaaaggccgcgtccttcgcgggaggcttgatctcctctgcactggcaaggatgccgagcaggatgggcaggtcatagagcgtgccctcctttttccgtcccgcgggggcaaggttcaccgtgatgcgggagacggggaacttgacgccgcagtttttcaccgccgcgcgcacgcgctcgcgcgattccttgacggccgtgtcgccaaggccgacgatatcaaatgcgggcaggcccccggataaaaagcattccaccgtgacctcgtagcccgagatgccctgaaggccgagcgagcgcaccgctgtgaccatactgttttcctccctctttcgcatcgaatcgtacagtttgcaattagtatagcacattttttgcatcaggcaaatccccctccgcgcatttttgcacattttgcacaaaatcaataaatcctcgcaaaagttctcgaaaaataaaaggaattgaacctattgttgcaaaatagtgaatgtttttgcgggaacaaggcgtttacatagcgaaaaaagtgtgctatagtgtcatcgttgaattttgcgttcacacgcagaagaaccgttttttgacggtgaaataaataggaggttcatttatggcaagaaaaatgaaatccatggacggcaataatgctgcggctcacgtaagctatgctttcagtgaagttgcggcaatttatcccattacgccgtcctccccgatggccgacctggtcgaccagtggtctgcaaatggcctgaaaaacatcttcggcagccaggtcaaggtcgtcgagatgcagtccgaagccggtgctgccggcgcagtgcacggctccctcggtgccggtgctctgaccaccacctacacggcctctcagggcctgctgctgatgatcccgaacatgtacaagatcgcggctgagcagctcccctgcgtgttccacgtctccgcccgtactgtttcgacccacgcgctgaacatcttcggcgatcactccgacgtcatggcctgccgccagaccggttttgccatgctgtgcgagggcaacgtgcaggaagtgatggatctctcccccgtggcacacctggccgcactttccggcaaggtcccgttcatcaacttcttcgacggtttccgcacctcccacgagatccagaagatcgccgtgtgggattacaaggatctcgccgacatgtgcgacatggacgctgtcaaggcgttccgcgagcacgccctcaaccccgagcatcccgccatgcgcggctcccatgagaacggtgatacgttcttccagcaccgcgaggcctgcaaccagtactacgacgctctccccgaagtcgtggaaaagtacatgggcaagatcaacgagaagctcggcaccgactacaagctcttcaactactacggcgcacccgacgctgaccgcgtcatcatcgcgatgggttccatctgcgacgtggccgaggaagtcatcgactacctcaacgcccacggcgagaaggtcggtctcatcaaggtccgtctgtaccgcccgttcaaggctgagcgcctgatcgaggccatccccgccaccgccaagaagatcgcggtcctcgaccgcaccaaggagcccggcgcacagggtgagcccctctatctcgacgtcgtcaccgcgctggccaacgccggcatcaccgacaagaccgtcatcggcggccgttacggtctcggctccaaggacaccccgcccgcttccgtgttcgctgtttacactgagcttgccaaggcggagcccaagcgtcagttcaccatcggcatcgtcgatgacgtgacgaacctctccctgcccgaagacaagaactgcccgaacaccgcagccgagggcaccatcgagtgcaagttctggggtctcggcggcgacggtaccgtcggcgcgaacaagaactccatcaagatcatcggcgaccacaccgacaagtacgtccaggcctacttccagtacgactccaagaagaccggcggcgtgacgatctcccacctgcgcttcggcgacaagcccatccgcagcccctactacatcaacaaggccgacttcgtcgcctgccacaaccccagctacatcaccaagggcttcaagatggtcaacgacgtcaagcccggcggcgtgttcatgatcaactgccagtgggacttcgatgagctgaaccaccacctcaaggcggatgccaagcgctacatcgccaagaacaacatccagctctacaccatcaacgccatcgaccttgccatcaagatcggcatgggcaagcgcaacaacaccatcctccagtccgcgttcttctccctcgcgaaggtcatgcccgaggagcaggccatccagtacatgaaggacgccgcgacgcactcctacctgaagaagggccaggatgtcgtcgatatgaaccacaaggccatcgacctcggcgccaccgcctacaccaagatcgacgttcccgccgattgggcgaacgctgtcgacgctgacgaggccgtctcctacgagggcaagcccgagctcgtcgagcaggtcaagaacatcctcgatcccgtggacaagatggacggcgacagcctgcccgtttccgccttcatgcctcatgtggacggccagtgggagctcggcgctgccgcttacgaaaagcgcggcgttgccgtttccgttcccacgtgggacgagacgaagtgcattcagtgcaacaactgcgcttatgtctgcccgcacgccaccatccgtcccttcgctctcaccgaggaagaggccaagaacgctcccgagagcgccaagatcgtcgacatcaaggccggtaagggcaagggcgtttacaagtacaccatggccatctccccgctcgactgtatgggctgcggcgtctgcgtcggtcagtgcccggtcggcgcgctgacgatggtctctcaggagggcgagctgccccagcaggataccttcaactactgcgtctccaaggtctccgacaagaaggacatgcaggatctcactgtcaagggcagccagttcaagcagcccatgctcgagttctccggctcctgcgcaggctgcgccgagaccagctatgcccgtctcgtcactcagctcttcggcgaccgtatgtacatctccaacgccaccggctgctcgtccatttggggcggccccggtgctacctccccgtactgcacggataagaacggccacggcccggcttggtgcaactccctgttcgaggacaacgccgagcacggcttcggtatgtatgtcggccaggaaaagatccgcgaggatctgatggccaagaccgagcagctccttgccatcgagtggacccagcccgcactgaaggaagccgctcagaagtggctcaacaccaaggacgacggcaacgccaacgccgaggccacgaaggaatacgtcgcagctctgcaggcgaacatcgccactgtcgacgagctggccgctgtgcccaagctcgctgagcacgccgccgagctcaaggccaagggcgagaagttctgcgactgcgatgcctgcaagctcgttgctgagatcctcgacaagaaggattacctctccaagaagtccgtttggatcttcggcggcgacggttgggcttacgatatcggcttcggcggcgtggaccacgtgcttgctcagaacaagaacgtcaacgtcttcgtcttcgataccgaggtctactccaacaccggcggtcaggcttccaaggcttccaacatcggtcaggtcgctcagttcgcggctgccggtaaggaaaccaagaagaagagccttgctgagatcgcgatgagctacggctacatctacgtcgcgcagatcgccatgggcgccaacccggcccagaccatcaaggccatcaccgaggctgaggcttacaacggcccgtccctgatcatcggctatagcccctgcgagatgcactccatcaagggcggcatgatcaactgccagaaggaaatgaagaaggctgtcgagtgcggctactggaacctgttccgcttcaatcccgcggctgacaagaagttcacgctcgactccaaggctcctgccggcggttaccgtgaattcctgatgaacgaggcgcgttacagccgcctgacccgcgagttccccgagcgtgcggagggtctcttcacccgcaacgaggacgcggccaaggagcgttacgagcacctcaccaagctcatcgacctgtacgacaagcagtaattgctgcttctacggtatgaaaaaggagcatcctttcggatgctccttttttgcgttattttatgtctgcattcagcagcttttcgctgatcgtatccatctgcgcctgactcagtgtgccggtcaatgcgctgccacctatgcgcacgatgcgcttgccgcgcgttaagacccacgagacgccccagccgtcgctttcggtatcgaaggcctgccacgcgcggtccgcgccccacggtgcggcgtccacctcgcggtattcccagttccggaaggggcgatgcgtgcggtaaaaggtcaccgtgtagttctggtagtatttcagctcgccgtccagacaggcgtcgaacagcggcgcaaatttcacgtcggtgacctcgtagttcagctccggcgcgtcgtcctcatcgcccgtgcgcatcctctgcgcaccgcggacctgagatgccagcggcgaggattcctccgccagctcgcaggaatagcggtcatagtctgttttggtcagatcctgcacatagagcggcagcggatcatcgtaggcgtagtaaaacgatgtctcgccattggaccacgtgacctcgtagcgcgtggcgttttcgggcgtctggtcgaattgtccgtttctgacgctgcgcaagtaggtaaacgaaaaaatgaacgagaggatcagcaccgataccagcgtgatacccctgtttagctctgcgctgccgccgcgacgcttgagcagccccttgattccccaaatcaatgcgtccagcaatacaatacccgtaaggatggcaaggtaagtcccccgtccttccttgtcactgtacaaaacaacggcacagcccatcaccagcgccaagagcgccagcatctgtaacacaggatgtgagcgcgtcggcaggaatcttccaagctcggcttcgcgcttcgccttgcgccgccagaggtagtagccaccaagctccaacgcacacagcaggaacaggagcacagaatccaaaatggccgagagcgcgcttaagcgggaaagcgccgccgcgaaatccctgataaagctcttacgcatgtcaaaaaatatccacagcgcgagcgccagcatcaaaaaccaggcgatgagctgttcctttttcatcgactggtgcagcgtttccacctgaagcgccgcgtccgtctcgatgggcacagcgtttacgtcttcgttgtagaaaacgttcatctgtgcgcggcttgcagccttgttccaccccgcctgcgcacagaaatcatagaacgtcagctcgccctcgctcggcttcgtcgggtcgaattccgaggcctcggagtagtaaacaacagaaaaaagcagcgcctgcggctcaatgcgccggtagcgccagaaatagccgagcttttcaatgagccagccctgcgccgccattttctcgaagtgctgctccatgcccgtatggtcgtaaaacgaatagaaattgtactcatattttgtttttagcatcgctatccctcgctttctctcatttctcgccgcccgcaaggggcgttatctctcaaatagcttctcgtagtcccgcacctgcgcctgcagacgctccacctcgttttgcagcagcgtttcaccctccgctgtgagctgatagctgcgccgccgcccctccgcgcgcgtctcgacgatgtaccccgccgccagaaactgctcgagcaggttgtagagcgtccccgggccgacagccacacgcccgctcgtcaactcgttcacgcgcgccatcacgtccatgccgcagcactcctcgcgcaggcacagcaggatataaaacatctgctcggtcagcgtgctgaatttctcccgcgccattgtcggccccccttttatcgatattcgatattcttgaggagagtatattatcgaatatcgatattgtcaagagggagattttctttttctgaacatcccccccttgttcgcacgggtgcgagggatttgcggcactggtgccgcggggaaggcagcgccgtaggcgctgcacgggataagggggatattctctcacgtgagagaatatcccccttatccccccaagagaacgcaaggggcctgccccttgaccccgcacattggcagtttgcagcttgaaggactgcacgcgctgcgcagtgcgggtgcggtgtacatggcttcgccatgaatccctgcgaatcgttacaactatcaaccgcaccttactatcgtgaggcgtgagtgacggtagcatggcggcagactgcgtgcgaaatagcggcattgctgcgctcgccgcattgtggagactggcggtaaacggaaattaggctgcactcctacaagataggcagagcggcacccgcaaggggtgtgccgcatccgtaaggcagcagagccgccaacggctgcgcaacagcggatgataggagcagaggcaaatcgtcttgcagaaccattggcggcgagcgaagcaatgccgccacgcacgcacttccactccggaggcacaaaagtcattcgagctcgagactgccaatctaagcctttctcttggggttccaaaggggccattctcttttgcgaaagagaatggcccctttgactcgccccctgcacggtgcagggacagaagcagccctttcgggctgcaaaatctccgcgcgctggagagcgcgtaaaaaaaggagcacccctgcgggtgctccctttcttcactctcccaggagccgaacgacactttcccagcgaatctggtccgtgtcgtagccatacgacttccccttcgcgtccgtgtagcggaaaaacggcccctccgtccagtcgttggacggattcgcgagctcgaccttccagatctcaagcgtcgagccgtcgccgtagtcgatcacggcgtagggcacctcctccggcgcagcggcggtgcggcccgcgccggccttgtcgataaggtataaaaggtcactgagatcgtcgatcgatacgtccgtttcgcttccgttcactgtgacgcgaaacgtctctgtgcttcgcgcatcgcgcgtgctgtccgttaagtcggaaataaacgcgtggaagcggaactggtagtgacaggcccagtatgtcagaccgccaaagagcagaaacagcgcgcagcagagcgcgatggggccggtcaaacgcttgggctttggcttgccgcggtcaacggaatcgtaaagtcccatgacttccctcctgttctcttgtccgctggtttcctttctcttctatttgggttgaattgcgaaaattactggttcgccgcgcgctccgccgcctcgacgacatggcttgcgaggatcgtgctcgtcacggtgccgacgccgccggggaccggggtgatggcctcgacgaccggctcaacttcggcaaagcgggtgtcgccgcagaggttgccgtccgcgccgacgtggatgccgacatccagcacgacctgaccggcgcgcacgctctccgcgccgaccataccggccttaccggcggcgacgacgaggatatcggcctcgcggcagatcttgggcaggttctcgctgcggctgtggcagatggtcacggtcgcgtgctcggcgagcagcagcagagagaccggcttgccgatgacaaggctgcggccgatgacgacgacgcgcttgcccttgatggggatgttatagtgcttgagcagcgccacgcaggccgcggcggtgcaggggggataaccgcccttggtgccggcgtacacggcggtcatggagccgtcggtgatgccgtccatatcctttttcgggtcgagcgccgcgcgcgccgcctcatcgtcgagatgcttgggcagcgggcggaacatcagcacgccgtggaccttcttgtccgcgttcagcgcgtgaatgttctccatcagcacctcctgcgtcacatcctcaggcaggacgacctgacggacggcgacgccgaccttttcgcagcgcttgagcgcgccgcgctcgtaggccaggtcatcctcgcgtgcaccgacgcgcaggatggcgaggcagggctctacgccgtttttcttcagttcttccgtctttgcatggagctcctcggtcagcgccttggcgacctcggctcccttgagcagcatagccatggtaaaaattcctcctctgatcgacgcggtcatccgcgttcctatccatgattaggataacaaaattaaaaattgctgtcaatttcttttgacaagcgcggcgggatattattttactttcttcggcagcttgccttttgccgcgctttttgctacgatattgctgtcaaattttgaaagcatcaggagggtccttcccatgtctgtgatcgaagagaaaaaagcactgagaacctttatccgcaagaaagagcgtacgctcgatcccacctataaggccgagagctccgaggccatctgccgccacctgctcgcactcgacgagtacaagagcgcaaagattgtctttgcctttgccggcaccgaaaaggagatcgacacctcgctctttatgaacgagaccatcgccgcgggcaagacgctgatcctgccccgctgcgccgccgagcacgccatcgatctgtgcgtcgtgcgctcgatggacgacctggaggcgggcgcctacggcattttagagccgaagaagaactgcgcgctcgtcaccgcggcggacatcgacttcgccgtcgtgccctgcctgtcgttcgaccgcaagggccgccgtctcggccagggcggcgggtactatgaccgcctgctgccgcagctccactgcccgacggtgctcatctgccgcgagcagctcatgtcgcccgaggtgccggtcgaggagcatgatatgcgctgcacgatgctggttacagagaagggcgttcttacgccggaggcgtaaaagagcttttttcctgcactggtgcaggaggacgatccccgtaccgtgcgggagtgcgtaaaagggggatactctctttctcgaaagagagtatccccctttgcaacccccgagagaaaggacgaggggccttccccctcgaccccgcacattggcagttttgggcttgaagagctgcacgcgctgcgcaatcaggtgcggtgtacatggcttcgccatgagtccctgcgagccgttaccggttgcaaccgcgccttactatcgtgaggcgcgtgtgacggcagcacggcggcaaactgcctgcgggcgcggcattgctgcgctcgccgcatacaaagaaatgaccgcatcagcggtcgttttcttgttcttttaagtcgtcaagtgcagctcggacagctgcgacgacgaatgccgagaatgtgcagtccttgccgcggatcgcgttctcgatctcttcgagcatatcatttggaaaacgcaccgatttgttggtcgtcggcggtacgcttggaattttaaaagccatagtctcacctgcaatacatttcatatgacaagtgtattgcatttttgtccaaatatgtgtaatataaaagtattacacttgtattgcgataggaggactatactatgaactatgaaaagatgtaccatctgctgttcaacgccatcaccgacgcactggaacaaatggaaaagcaaaaccttggcagcgcaaaagacctgctcaccaccgctcagcagaaagccgaagaaatctacatggaatccgccaactaacccgcggcgagcacagcaatgctgcctcggcaggcaaaagcaggtttgcacaaatctgaagtagccggaaattgcgttagactgtcgaatcgcaggcagagcggcagcgggtaataggagcaacccaaatcgtttagcagcaccacttggcaggcacccgattcggcaagcacctcagctcttcaagccccaagcttgcaatggcggggtcaaggggcagagccccttgcgttctcttgggggtgtaagggggccattctctcacgtgagagaatggccccctttatccgtgcagtgccatcggcactgctattccccctccacgcgcagcgtgaaaagcctcctcttatctgcaaagataagaaaaccacccctcgctgctgcgagtttcttcgatcgtccagcctgcttcgacgagcttctcgcgcacctcatcggcacgatcatcgatgatgccggagcagaggaaaatgccgccctttttgaggagcttccccacctgcggggcgagcgcgatgatgacgtccgcgacgatgttcgcaacgatcacgtcatagtcgccgccgaactccttctggagccttttgtcgctgagcacatcgcctgcgcggacggtgtaatgctccttgccgacgccgttgagtgcggcgttttcatacgcgacgccaacgcacttgtcgtcgatatcgcaggcaaaggcgtccttcgcgccgagcagcagcgcggcgatggataaaatgccgctgccgcagccaaggtctaaaaccttttccccgccgtggatatgctgctcaagcgcctgtaagcacagccgcgtcgtggcgtggctgccggtgccgaacgtcaatccgggatttaagacgagcttgacgcgcccgtcctcctgcgcctgctcccattccggcacgacgagcagccgctcgccgatctccatgggcttgtagaactgcttccagttattctcccagtccgcgtcttcgacattttccatgctgaggatcagcggcgcgtactcgggatgctgctttttgaaggccgacagaccgatacggaactgcgcgagggtgttgtagccctcggcgctgtcctccaaataaaacgtgatgcggctcttgccgtgcatctgctccatcagctcgtcgtcgacatagtcccagtactggtggttattttcgaggaagtccttgaagtcgccctcctcgtcgatcatcaggctgtcgatgccgtactcgctcaaaagctccgtcgcgggttcgatgcccgcgggctgcgtgtcaaggtgtaattccagccacttcatcgctcagtccccacaaagaacaggcccaacgtaccgcagccggtgtgcgcgccgatgacggggccgatgaactcatcgcgcacgtccgtcacgccgaagcgctccttgagtagccccttgacgtactcgacagactccgggcagttggcgtggcagatgagcatgggctggtttttctccggctcgacgccgatctcgccaaccttgtcgacaagtgcgcgcagcgccgccttcgtgccacgggccttgctcacgggggtcaagcggccctcgctgtcggtgtgcatgacgggcttgatgccgagcatcgtgccgaccagcgccgccgtggagctcacgcggccgccgcgctttaagtggttcagatcgtcgacgatgaaccagtggcactggctctggatgatggagcggacgtaggcatccagctcgtcgatggtcaaattcttctcgcggcgctcgcgcacggcgcgatagagcagcatgccctgcccgcgcgaggcggacagcgagtcaatgactaagatcttcgcctcggggtacttttcgcgcaggtcttccgccgcgatgcaggcggactgatacgttgtggacagcgcgctcgaaaagcagacgcagaggatgtccttaccctcctgcaagaccttttccatcgcgtcggtgaactggccgacgttgaccgcggaggtcgtgcagtccgcgcccgcggcgatcttggcgaaaaattcctcgggcgacatgtccgcgtggtcgggcgtattcaaaagcgttttgccctcgatggtaaatgagaggggcagaacggtcaactcgagctcttcgacctcctgctggctcagatcgcaacagctatcggtcataatgatataatcacgcattacagcacttctcctttcagggaagaaaatcacgtttttgtcttttgtatcctgccggatgccatattataccaaattcccccacagcctgtaaatatgccgcgaaatttattttatcttccgcttcagcatagccgcatggaatttgcaaaggggcgcggccatgccgcgccccttaccgtgcttttattttgtatccgagcactgctccacctgtattcccgcaagcttcagaaattttttgtccgtttgaatgctttgagtcaggaatttgctgtccttgaacagcgcgtaggtcgtcaccggagcgggcacgctctgcgcctgctccctgtcagtaatatgaatgaccttcaatggcacgcggtacgctctcgcagcctcttccacgcgcggcacccagtagtaagtaaacgggcactggtcggtataatagaggacaaagcctctctcttccaccgcagggtgcttggcacaggccttgaatctcggcggctctgcatcctgtgcaagcggcagatacatcaagttgatcccgcattccgacgtgtcggcaacggcaaatcccttatatgccagatacttcgggtcggagagaaactcccgctttcggccctcggacgagagaatgcacagcccccttcgtccctgctcctttgcgtcccggatgcactctcccagcagatcgtcggaatatccgtgtcctttcatagagccggagacccacaggcagtcaatataaaaatacccgtccgcctgaatagggacccacgcgttttctgccggaatatactcaatgaagcacttgccgcgctccgtgcttcggcagaagaccagcccttctttaaagcgctgcttgagccactcttttttgatgacgccctgcttgccggacatcgcacagcagatgtgctccttctcaatattctcatcggtgattcggatatagtccattgaaagaacctcccggatatttcataaattctccacgccctgcgggcgccgccccttacttctcagcccgacagctgtcgatctttcagattcgcttacgccgccgcaaaccgataggtgaccgagttctgccatggctcctcgtttgccaagtccgtcctgatcacctcgccgcccatcttctcatagaatgctcgggcattcagattctcgggaacacagtggcaggtaaaaaacttcgccccgtgttccctacaatacgccttgataaaatcaaatgccgcccgaccgatcccctgccgctgatattcagagagaatatacaaggattgcaagatgactccatctgttctgctcatcgtcagataaccgatattttgatcgtctttttggagcagatacacagaatacgccggattattgatccgcagcagttctttctcctgatgccacgcccaatcaaagttgtcgatcatatcatcggggtagatccctctgtaagtagtgccccaaatttgatgccgcagggcaatgatctccggcacatcctctttggccgcctcgacaaacatactatcgcttctcatagggcaagtttcctccccgtaacgctttcaacttttccacatccagcataccatgctgccgatttcgctgcaagcgcaaaaaagcagcgcctttcggcgctgctttctgtttgcttttgggagaaaccgctcactgctgttcggcggcctttgcggcggcctgctgagcttcgatctcgatgagggcgtccttgcgggagaggttccagcggcccttttcgtcgatctccatgaacttgacccagatcatatcgccgacggtgacgacatcctcgaccttctcgacgcgcttgcggtcgagcttggagatgtggacgaggccgtccttgcccggggcgatctcgacgaacgcgccgaactgcatcaggcgcacgacgcggccatagtagagcttgccgacctcgggcacgaagacgatatcgtcgatgcacttcttcgcagcgtcgcacgcggcggcgttggcggaggcgatgtggatggtgccgtcgtcgtcgatgtcgaccttggcgccggtatcggcaacgatcttctggatgacgctgccgcccttgccgatgacctcgcggatgcgctcggggtcgatgtgcatggtgatcatcttgggcgcatactggctgacctcggcgcgcggctcggagatgcagggcagcatgatctggtcgaggatctgcacgcgcgcgtcataggtgatctcaagggcgttcttgatgatggccatcgtcaggccgtcgttcttgaggtccatctggatggcggtgatgcccttcttggtaccggcgaccttgaagtccatttcgccgtggaagtcctcaacgccctgaatgtcgatgaacgtggtgaagtcgtcgccgtcctgaatgaggccgcaggagataccggcgacgggtgccttgatgggcacgcctgcgtccatcagcgcgagcgtggagccgcagatggagccctgagaggtcgagccgttggaggagacgacctcgctcacgacgcgaatggcatacgggaactcgtcgacggacgggatgaccggcagcagcgcgcgctcagcgagagcgccatggccgatctcgcggcggccggggctgcgggagggcttggcctcgccgacggagtagccggggaagttatagtggtgcatatagcgcttttcggtctcttcccagatggtgtcgagcttctgggcggcggaaagcgtgtcaagcgtacaaacggagagcacctgcgtctggccgcgggtgaacaggcccgagccgtggacgcggggcaggacgccaacttcggcagcgagaggacggatctcgttcttctggcggccgtcgacgcggtggccttcgagcagccatgccttgacgatcttcttctggaacttgtaggtgatctcgtcgaggaactgatccatatcgggatactcctcgaggaacttctcgtgccagtgctcgatcatctcgttccagcgggcctcgcggacgttcttgtcgtcggtgtccatcgcggccttggcctcgtccatgaagttttcgacgatcttgtcgaacaactcctggttgaagctcgcgtgcgggtagtcgaacttgggcttgccgatctcggcgaccatgcggttgatgagctcgacctgcttctggttctcgttgtgggcaagctcgatggccttgtacatggtgtcgttgtcgacctcgttcgcgccggcctcgatcatgacgaccttcttgccggtcgagacgaccgtgacgtcaagatcgctgaccttgcgctgctcggagttggggttgagcacgagttcgccgttcacaaggccgaccttgagcgcgccgacagggccgttccaggggatatcggagatggcgagcgcggcggaggtaccgatcagggccgcgatctcgggagagcagtcatggtcgacgctcatgaccgtcgccatgatggagacgtcgttgcggaagtcggaggggaagagcgggcggatggggcggtcgatgacgcggctggtcaggatgcccttttcgccgggacggccctcgcggcggttgaaagaaccggggatgcggccgacggagtagagcttctcctcaaagtcaacggagaggggaaagaagtcgatgccgtcgcgcgggcgggcggaagccgtggcgcagacaagcacgcgggtgtcgccgtagccgaccatgacggcggcgttggcgagctcggcgagcttgccgacctcaagagtgaggggacggcctgcgagctccatctcgtacttgtggtagttggggaactgcctgtgggtgatgatggtagacatttgtcgatctccttttttgtaaaattccgtatgggagccgaccgtttagcacttgaaaaaacgtcggccgcgccgccgctttttcaactgctaaagcatagcaggctctcatacgcgcgggggaagtgcccagggcgaaagtgtgaaagaagggtggtgcgcatgcacaccaccctgttttcaaacttacttacggatacccagcttggcgatcagggtacgatagcgctcgatgtccttcttcatgaggtagtcgagcaggctgcggcgcttaccgatcatcttgtacaggccgcggcgggagtggttgtcctgcgggtgctgcttgaggtgctcggtgagctgagcgatgcgctcggtgaggatagcgacctggacttccggagaaccggtgtcgccttcgtgggtgcggttggcttcgatgatagccgtcttctggtctttgagcatcatagtgtgatatccacctttcttaaattctcccaacactgagcggcgggtcggtgaatcctccacgtcctaagtgcgggaatgcgcacgatacgcgtgctgaattatgatagcacagctttttcctattgtaaagcaaaacctgtgaaatgataccgcttttttgctttttcccgtcccacacagcaaaaccaagaaaaaagagacggcctaggccgtctctttgagaccgtcgaaaaagtggcaaagccactttttcgaaaaggattcgctgcgttctgcgcctcgattgtccgcttatagcggacaattcgacgctcgctccgcgtaaagtgttttctgccagaaggtgaattgccccgtagcgggcaagagaagcccctccggagggcgcgcatgtcgcggcagaaaacagattttacagctttcacgtctgcggacgtgaaactctgcgaggctttttcagcgcagcatatttgtcgccgcgcacggcggcaaatatgctgctgtttcgttctcactcaaaaagcggcataccgttttttgatcattttctcagtcctgcaaagtgctcccgcgtcagtttaatcaccacagggctcagcagcagcagcgcgatgaggttcgggatggacatgaggccgttgagcgtgtcggagatatcccacacgagcgtcaggtccgcgaccgcaccggccacgacaacgaggcagaagatgatctgataggggcggatgatcttgctgccaaagaggaactccgcgcagcgcgtgccatagagcgcccagccgaggatggtggacgtggcaaacagcagcaggccgaccgccagaatgaccgagcccgccttcgcgccgaagacgctcgagaagcccgcgaccgtggtcgaaacgcccgcagccgcgttgttgccgtagttgccgtccgccgcgccggagcagaggacgacgagcgcggtaagcgtgcagatgacgatggtatccataaagacctcgaagatgccgtaaaggccctgcttgacggggttcttttccgacgtggcggcgtgcgcgatcggcgcggagccgaggcccgcctcgttggagaagacgccgcgtccgacgcccttggtcatcgcaagcttgatggaaatacccgccgcgccgccggtgacggcagcggggttaaaagctcccttgaagatggaagcgaacacgccgggaacggcgctcaaattcgcaaacacgacaacgagcgcgcagacgatgtaaataacggccattccgggcacgagcttttccgtgacctgaccgatgcgcttgacgccgccgagcagcaccagcgccacgaagatggcgacacagatgccggtgatcaggcagatgagcatctccttattcgccgcgtcctcgttgaacgcgatggcgacggacttgacggagtccgcgatggagttgacctgcgcgatgttgccgatgccgaacgccgcgatggcgccgagcacggcgaacacggtgccgagccacttccacttggggccaaggccgtttttgatgtagtacatgggtccgccgcaccagtcgcccttttcgttgcgctcgcggtatttgacggcgagcgtgacctcagagaacttggtcaccatgccgaaaagcgccgacacccacatccagaacacggcgccggggccgcctaaaatgatcgcgcccgtgacgcccgcgatgttgcccgtgccgacggtggaggcaagggccgtggacactgcctgcagcggcgtgatctcgccgtcgccggcctcgcccttcttaaagatctttccgatggtgtttttccaccagtagccgatcttggtgaactggataaagcccacagcgatgctcaggtagatgcccgtgccgaccagcagcgccagcatcaccggcccccagacgaagccgttgaccgcagtattgatcttcataaactgttccatacacttctccttcctaaaaatcacattccgtaaaacgtttgatgaatttctttcatatctcagagaataccaaatcggccgcccgctgtcaacggggcaagtgtcgttttttgtcgtgcgcgcatggcaaatcatacattctgcataagttttaatgtattctttacgtgcatttagtgatttgcacagcaaaacggtggaaaatttttgcattccccgcttgacagccggtgtccgccatgctatcctaactgtactaacacacttaacacagcaggaggtgcctatgttccacttgatatttctgatcccggttcttgttgtactgctgctcggcattttgctgctcgccgtgctgtgcagccgatgaatgcaggaggaatgccatgatcatcttaaattaccgcgacgcgcgcccgatctacgagcaggtgtgcgacgggctgcggcggctgatcgtctcgggcgcgatcgccgacggggacaagctcccctcggtgcgcgcgctggcgacgcagctcgccatcaaccccaataccatccagcgcgcctacaacgagctggaaacgagcggctactgctgctccgtgcccggcaagggctgctttgccgtgcacacctaccgcgcgcaggacgacgcgcgccgcttatcgcttgagcatcagctcaaagagcttttgcaggagctgcgcgccatgggcgtgagcgaagaagacattcaagcattgtgcagggagggagaagcgaaatgatcgaagtacgcggtcttaaaaagacctttgacggctttgccgcgcttgacggtgcagacctgagcgtgccgcgcggcgcggtctacggccttgtggggccgaacggcgcgggcaagacaacgctgctgcgccacttgacgggcgtttatcatcaggacagcggcagcgtgacctttgacggccagcccgtctgggaaaacgcggacgtgaaggcgcgcatcgcctccattcccgacgactggttctactttatgcaggcggggctgcgcgatatgatgcgcttttaccgcgggctgtacccgaagttcgatcaggagcgctttgaaaagctccgtgaggtcttcgcgctcgatgaaaagcggccgctgcgccgcatgagcaagggccagcagaagcaggcggccttctggctcgcgctgtgcacgatgcccgactatctcatcctcgacgagccggtggacggcctcgaccccgtgatgcgccgtcaggtgtggagccccattttgcaggacgttgccgagcgcggcacgacggtgctcgtctcctcgcacaacctgcgcgaattggaggacgtgtgcgaccacgtgggcgtgatgagccgcggcaagctcctgcttgagcattcgctgagcgaattgcaggactataccgtcaagctccagctcgccttcgagggcgcggagctgcccgagctgccacaggagatcaaggtgctgcaccacgcgcagaccgggcgcgtccacacgctcatctgccgcggcagcacagaggaactggaacagcagctcgccgcgctgcacccgatctttatcgacgcggtgccgctgtcacttgaagaaattttcatctatgaactgggaggtgaggactatgcgatccgcgacatcgttctttgataagactttattccgcagccagctcaagcacacctggccgctctggcttggctacaccgccttgtggctcttcctcgtgccggtcgcgctcttttcagagctttccgcctatcagggcggctacagcgcagcggatgcgtcccgcctgctgctcaacaccggcgtgcgcggcggcgtctttatttccttcgttttcggccttttctttgcgatgctcgccttctcgcacctgacgcaaagccgcgcgacaaacggcttccacgcgctccccgtgcggcgcgagaccatctttctgaccgcctacctcacgggactgttctgccagctttccaccattctcgtcacgttcctgctcggcgcggcggtctctgccccgctgcacttaagcttctggagcgtcactgctgcggccatgggcagcgccatgctcgaagccgtctttttctactccttcgccgtgctgtgcatgatgatgacggggcagatcctcgccgcgcccgtcttctatttcgtcggcaatatcctcgtcccgggaatggaatatctgctgcgcaactttgcgggcaatttcctctacggctacagtgggcacaccgacgttgcgctcggtttcctctccccgcccctctatatgtacaccaaggtgggcatcgcctcgatcgagacctgcgagagcgactcgtactatgtgactgcctacgcgctcgagcgcggctctttcatgatcctcgccgcctacgcgctcgcggggcttgtcatcgccctcatcgcgctgctcctctaccgcacgcgcaagagcgagatgaccggctcgacggtcgccttcccgtgggcgacgcccatcttcaagtacggcgtggcgttctgtaccgccgttgccctcgggcagctgctctactatttcctcttcggccagtaccgctcgggcggcagcgattccctgcccggcacgatcctctgcatggtggcggcggggcttgtgggctactttgtcgccgagatgctcatcagaaagagcttccgcgtcttccgcgcgggggcaaagggcgcagccatcgtcgcgggtgctctcgtgctgctcggcgttgcaatgagcttcgacctcacgggctatgaaaagcacgtgccggacgagagcgagatcgaatccgccttctacaccttctccggcatgacaaacgtcacgaccgacgacgccgataccatccgccgcctcaccgcggcacaccgggccatcgtcaaaaaccggaacgagcaggcgcgcatcgcagacgcatgggacgcggatacgctctcccagagcgactatgacgacattgaacccttctccctgcgcctgacctactacctcaaggacggctcgcagctctcgcgctcctattcgctctacctgcggagaagcgagctcaccgtgccctcgtccgtcacagcgcgcgtgaacgcgctctatatgtgcagagagtccgtgctttgccgcgtcctcggctacggctacgagcacctcggcgacacgccgcgtttcctcgacagctattgctactattacgatgataacgccggtggaaaggactatgccctcaccgccgcgcaggccgaacaggtctacgccgcgctgatgcaggacgttcaggattccgataacggcggcagcgacatcttcgccgtgcaggagcacctgtacgattcctccatctccttctcgctcgagctgtactatgagtccaccaatgaaaaaggccgcccggaggtgtatacgctcagtccccctgtgaatggctcgacgcccaacaccctgcaagtactgaatgagctgctgcccgagctgagccccgcctactacgacaacgcgaaggaagaggacatcagcgacctccctgccgccgaagaaaacacttccaccacggaaagcgtgaactaacatggcagaaagaacaaagcggcggcgcaggcgccgccgcaccgggagtaagaaagccttcctcgtcctgctcgcgctcgttttgctcgttcttggcggcgtgaagctgcgctatgcgctcgcgcaccggaatctccccggttcgaatgtcagcgtgccggactttgtcacggtcgactacattccgacaaacgaatactctcgtcccggcacgccgctcaaggaaatttccggcgtggtggtgcactatgtcggcaatcccggcacgaccgccgccaataaccgcagcttttttgcaaacctcgccctgacgcacgagacctacgcgagcgcgcactttgtcgtcgggctggagggtgagatcttgcagtgcgtgccgctgacggagatcgcctactgctcgaacaccgcgaacgactacaccgtgtccattgaggtctgccaccccgacgacacaggcaagtttgacgatgcgacgatggagagccttgaagcgctcgtcgcgtggctctgcgagacctttgacctcgaccccgacgcggacgtcattcgccactacgacgtgacgggtaagatctgccccaaatactatgtggaaaacgaggatgcgtggcttagttttaagcaggacgtgagcgtgcgcatcgaagaggacaaaaccgcgaacagtgaaaccaactgataaatcaaattgggagggagctcatgcacgactttgtttcctatcttttttatcttttgcagcgcggcatgcgctttgccgtgcccgccgcgctcgtctgcggtcttattctggccgtttgctacgccgtctgccgcaggcagggccgccgctttccgtggggaaaggcggtctgcgcgctgctgctcgtcggctgggcggcggtcacattcttcgtcacgctgctgcgcagcgagccgaatgaatttgccgcgcggcagtggaatttgcagcttttccttgcctggcgcgaggcgtatcagcgcttcacgctgcaaatttggctcaacgtgctgctcaacatcgcgctcttcatcccgctgggatttctgctgccgctgctcgctaagccgtttcgcaaatggtacgccgcgctgggcgcgggcttcggcgtctcgctcctcattgagctgacgcagcttttcaccgggcgcggcatgtgcgacgtggacgacctcttcaccaacacgctcggcgcgatgctcggctggtgtgcagcgatgtttgtgctcgcactgcgccaaaagagcagagcgtggccgcgctactgcgcgctgcccgccgcgttcacgctcgcgctatccgctatttttatctcctacgccgcgcagccctacggcaacctgcgcgacgcctccgtcacgacggcggacctgagcggcgtccgctggtcggtcgactttgcgctcgaccaggacagcaagaccgcctgggtctatcgctcgcaggcgctcgacaacgcgggtgccgatcgtttcgccgcggaattcgccgccgcgcacggcgtcgaatttccggatgcgtactactacgatgaccttgtgatctacgccaaccactcttccggcgacttcctcgacgttaccctgcacgacggcacgtgggaatacagctttgggcgcgatcacacgcccgttttcgatgcgcccgcgtctggtgtcacagaggacatgatgcgcgaaacgctcgacaactttggcttttccgtccctgccgacgccgcgttcacgctctcgccgtatggcgagacctcttaccgtgcggtgttctccgccgatcttctccccacggagggaggcttcctccacggcacgctcacttgtgatctgagaacacaaggcgacggtcaatcgacgctctcgcagctcgaaaaccgcatcaccacgctcgcgcccgtgcgcgaagagcctattctctcccccgcgcaggcgctcgccgcgctgcaatcgggcaagagctttgagggcgcgtggttcgcgcaaagcgtccagcaaattgaggtgcgctcctgcacgctcgactacctctccgattccaagggcttctaccagccggtctaccgcttcgagctgtcgctcgccggtcaggcgggcggcatcaccgacgcggtcgactatgtccccgcgctcttctgagcgccggagtgcaaggaggcttacgatgaaacgcatacttgcctcgctgctcagcttcgcactgtgtctcgcgctgcttttcttcgtccgaaataagtctgacgagccgatcctgcacgtcgcgctgaaaggcgccggcgagcaggacgccgcctacgtctatgaaacggtctatgcaagcggcaaaagccgcgcctgcgacgccttcacgcccgacgcctgtgtcttttacaccgccgactacgcagactttgacacctccgcacttcgctcgcacagggtcaacacacttgtcgccaccacgctctatgattctgtcggcaatgtcgttgaccccaacgaaacgatgatcgccatgatgcacgctgccgcagaccagatcgaccatgcgatcttcgattttcagatcatcgtcgtgaacggccagcgctactttgcctttgttaagctcaacgtcaactggtgggatccgtgcacgctgtacgagtacgacggcggagagctccgcgagctcgcgcagtgggacaatatgcgcctgctgtcgatcggtttcatatgaaaaaagcggctgtctctgtcgagacagccgcttttcttttttatttattcttttccagactgtacggatctctgcccgcggcgaattcggagatcatctccgccgtcagggcgatgccgttgttgacgaaggtctcctgcaattctttccggctgacccacgcgccgtccgccagctcaaagttgtcgagatggatcgtatcgtcgtcgccgtcgagcctgcaccagaagcccatcatgatgttgccgctgatgccccagggctgacagcgatagtagcgcaggtccttgaccttgagcccgacctcctccatcacctcgcgctgcacggtctgctcaaagctctcagcaaactcggtgaagcccgcgacaagcgccgtgcgctgcgcgccgggacggttggcgtacttggtcaaaagcaggtagtccccgtgcgtcaccgccacgatgaccgacgggttgatgcgcgggaagatcatgttgccgcacttgggacagcgcatcatgcgctcgttcacgtcgtggacgagcttttccccgcagcggccgcaatagcgcgcgctgcgataccaagagcacagatgccacgcgctcacggcggcgtaggcaagctcctgcggcttttccgtgcggaagaggccgatattgcggtaggaatagccgtcgagcgtgcgctcttcctcgtcaaagagcaggtaatactcccgcccgtcgagttcaaaaagataggtgaacgcctcgtcggactcggtaaactgcgcacgcgatgggaacttgaggccgttgtcgtcgatacggcacaaaaggtcctgcccgcggaactgcaccacgacgctgctctttttcggcacggcgttctttttccactcgttgtaaagatgcttcggctcgatatcctggatcatgtcggctttcctcccgcttgtctgtttgatagcagggctattctacaacggataggcgggatttgcaagcgggggcttattcctcgatcatgcgcctgcgcttcagctcttcgatctttttcccctcgcgccgcacggaaatcatactggcaataccgcccgccagcagtcccgccacgatcagaatagtcagcaccatatatacaggtgaatcaagctgcgtgtccagccagtttgaaaaaccgtactgcgagattgccttgtacgcatagttccctctcagcagcaccagcaccagcgcgccgagcatcatgtttcttgcgtgtgagcgtcgcttttccagcgccgcgatcttggagtcaaggtcggagtacagctcgaacgcaccgtccgacgtctttttgcgcaggatcagcgcctcgccgtactcgcccaccagtgccgcgcccgtctcgccgagcgtgcgcagatagtcgtccttctcgccgtcgcgcgattcgtaaaagtattgcacgcggtaggtgtattcgtcctgctccccgcgcacaaagtgcagctcatcgcgcacgatctcgcagcactgccagccctcgtgggacatctcgttgagatagcgctccatctcctccacccgctcgggggcaagcggtgctctgttccacttcttcgtcatcgtctctgccatttctgctctcctttcactcctgaatcacgcgctcggcttcgagcgccgcgattttctttttcgcgcggtgcaggccgcgcgggcagtcgacaaaacccacgatgcagacaagcagaagaagagaggccgccacaagcatcagcaccttcgccgtactaaagtttatcgcagccacgcccgcgtaccgtccgatcacgtttgcattcatcagcgttgtcagaacattcatcagcatactgctcccccagaaaaagctcatgatcagacccgcgcgcaggtagcgcacggcttttttctgctgggcaatgcgcgaatcgaggtctgagtacagctcgaagggcgcaccgtccgcctttttgcgcagaacgagcaggtctcccacgccgccgacctcttcaatgccaaactccgcaagctccgccgtgtagacaaggcggtccatgcccgcctccttcacctgcacgcggtactcgtattcgcctgctttcccgcggcggtaggtggaaaacagcgagccgaatttttcaagaagccagccctcttttgccatccggttcgcctgctcctcgatccgctcgggatcaatggcatagctcgacaaatgcggcagcaccttcttgtccttgaccatggcgattctcctttcactcttcgatcaggcgtttccgcttcaattctccatacgttttccccacatgggcagcctgcattgcggtccttaccgccgcggcggtgcccagcacgcccagcaccgcataccagatgatgtgctttccccatagccgcagcgataaaaaacttggctggtgatatgtctctcttaggtcggcatacatcgcgtcaaagctgacagccagatcataccagacccacgtgttatagaaccagtccgccgctagcagcgcaaacgcgaccgccagaatgatctttatccgcatcagtcgccgcgcgtccatgatctgcgcatcgaggtcagaatagagcgtaaacggcgcaccgtccgctctcttgcgcagtacaaggaatgaacccatatcgccgaccttctcgacgcccatgtccgcgagcgttttcacatagtcggtacgctggccgtcacgcgattcgtagatgtactgcacacggtattcatactcgttcggctcgccgcggcgataggtgtaagtgccataggtacacttttccagcaaccagccctgcgccgccagacgtgcaaatttgcgctccagttcccccggttccaaaaaacaataaggaaggtgccagacccgctttgtgtccttttccatcgttatcctcctctcagttccattcgtttgtcagcgcgtcgccgttttgcgtcagctcgtgcagtctgcgcagctccgcgcgcacggcctcgcggcccgcgggcgtgatctgatactcctttttgcgcccctcgctctcgtcgccgagcgacacgatccagccgcgctcagtcagcgtcgcgagcgcgccgtagagcgtgcctgcggcgagctgcacacgcccgccgctcaaatgccctacgttctgcatgatgccgtagccgtgcagcggcgtatccagcgaaagcaaaatgtaaaagaccgcttcggtcagcgccgtcgttcccatgtggtatccttctttcctcggccaacgttataacggtagccgatatatcgtctaccgataaagtatcatattgctctctccccgtcaactgaaaaaacggaatgccctccctaccattgccaacggttttccacaacgcaaaaaggcagggaatgcttccgcattccctgccaaaataacttatcccgccgcccacaggcggccaaaagcgtcgcagactttcgcgtccgcagacgcgaaataaatttgaatcgtaaattctgacgtcaccgtcgtggcattacgactcccgcgccctttcgggcgcgccaatcgtgccacttcctcgaaaccagctcgcttcatccgccactggcggcgcttcgccgatttccatgtgtgtgacaatttacacttttcaggccgctgcgcgcataaaaccccccaattaaaacaaaggagcggcaaagccgctcctttgttttaaagtttcgtgataaccggtaaaaccatcgggcttctcttcgtcgccttaaaaagatagttgctcaccgcgctgcggatcgcgcccttgagttcgttcaggtcgcgcccgcgcttgccgcggtaggcctccgccgtggacatcgtgaggtttctgaggtcctgcagcagctcctcggaatccttgacgtagataaagccgcgcgtgataatctccggctcggccagaaggtcgccgttctgcgcggagatgggcagcacgacgacgaccatgccgtcctccgccagatgcttgcggtcgcgcagcacgaccgcgccgacgtcgccgacgccgtagccgtcgacaaacacctcgcccgcgggcgcgtagccgggcacgcacttcatcgagcgcgcgccaatctcgacggcgtcgccattgtcgcagatgacgatgttcttgcggtccatgcccatctggagggccaggtccttatgcagctggagcatgcgctgctcgccgtgcacggggatgaaatacttaggctttgtcagcgcgtggatgatcttgagctcttcctggcatgcgtggcccgaaacgtgcagcatgtccgcgcggtcgtagatgacctcaacgcccttgcggaagagctcgttgatgacgcgcgagacggtgttctcgttgccggggatggcgctcgccgagatgatgacgcggtcgccggggccgacctcgatctgcttgtgctgggagaacgccatgcggtacagggcggacatctcctcgccctgcgagccggtggtgacgatgacctgcttttcaagcggcatcgacttgatcttgttgatgtcgacgacggtgttcttcggcggcttcatgtagcctaaatccatggcgacctttgtcacattctccatgctgcggcccgtgacggcgaccttgcgcccgcactccgccgcggcgtccatgatctgctggatacggtggacgttggaggcgaacgtcgtgacgatgatgcgctgtttgcagccctggaacaggcggttaaaggtcctgcccaccgtgcgctcactcatcgtgtagcccgggcgctcgacgttcgtcgaatccgcgagcagcgccaaaacgccctgcttgccaagctcgccgaagcgggcaaggtcgatgacctcgccgtcgatgggcgtcgagtcgatcttgaagtcgcccgtgtggacaacggtgccaaggcctgtgtggatggcgaacgcgacagagtccgcgatggagtggttcacgtggatgaactccacgctgaacttgccggccttgacggtcatgccgctttccaccgtgacgatcttcgtcgatttgagaaggccgtgctcttcgagctttaagcggatgaggcccgcggtgagcctcgtgcagtagatgggaatattcacctttttgaggatgtagggcacggcgccgatgtggtcctcgtgcccgtgggtgatgaacatgccgcggatgcggttcttgtgcttgacaagatagctcacgtcggggatgacgcagtcgatgccgtacatgtcgtcgccggggaaggccatgccgcagtcgaccacgatgatctcgccgccgtattcgtaaacggtcatattcttgccgatctcattgagaccgccgagggggatgatttttaactgttcagccaatgctggttcaactccttttgattcgtttcacaatagaataacgatagatttgttttgattttgtcatgtgcgtccggaccaaaaagcgcaaagcattggagacgtccgtgctctcacttcgccctgcttcacgaagcgatcgcacctgcggcgccttttggatccctatggactttctatgagaaccgcgaaaatgcggtcaaaacccgttgccgcggaggctcttgcgcgcatttttcccgcgcggccatccgctattgctggatagtatagcacgttttccaccaaaagtataccacattttttgtcgacgccgaaaaataaaatattgatattgtatccgcccgccccgccgtgttataatgaaatggattattcccgcggtttgccgcagtaatatcgatcataacgggagggcagcttctttatgcggaacaaaaagatcagcaaactggtagaccccagcttccggctctactttcttgtcggctttctctttgccgccgtcacggtgcgcgtgagcatcccgctcgcgatctgcgaggctgcggcgatggcgtttctctggtggtacttccgccacacggcgcagaagcgccgcgagggtatccgccagtatatcgacgacgtgaccgacgacatgaccaccgccgacaaggcctcgatgctctcggccccgttcgcgatgatggtcttccgccccgacacgcaggagatcctatggagcaacgacagcttcatgcagctcaccggcgtgcgcgaggatatcttcgacaaccgcatcgacgacattctccccgattttccgacgcactggctgctcgagggcaaaagcgaatgcccggacacggtgatgatgggcgggcgtcacttccgcgtgttcggcaatctgagccatccctcctcccgccgcggcggacagagccttcttgccacaacatactggacggacgtgaccgagcaggactcgctgcgcgaggagaacgagagccgccgccccatcgtctcggtcattgtgatcgacaactacgaagagctgatgaaggctggcagcgaggcgtcgcgcagcgcggtgctcgccgccatcgacgaaaagatcagcacatggctcaaggattcgcacagcctgctgcgcaaattcgatcgtaaccgctacgtgctcgtcacgaccgagcaggagtatcaaaagctgcttgagggtaaattctccgtgctcgacgcggtgcgaagcgtcgtcactgaggacggcgtcgccgcaacgctctcgatcggcgtgggcaaggatgtggatgactacgaaacgctctatcagaacgccatgctctcgatcgaaatggcgctctcgcgcggcggcgaccaggtcgtcgtgcgcaaccgccttgactttgaattctacggcggcaaggccaagtcccccgaaaagcgcacgaaggtcaaatcccgcgtgatggccaacgccctcggcgagctcatttccgacgcaggccagatcttcgtcatgggccacgcgcacgcggacatggatgtggtcggcgcagcggccggcatctgctgcatcgcgcgcaagcgcggcaaaaaggcgcagatcgtcatcgacatggaagacaacgtcgcaaagccgctgctcagtaagcttgcggctcttccggaatacaaggacgcctttatctccggcaacgacgcgttcatctccgcccagccgggcgcgctgctcgtcgtggtggacacgaaccgccccgactttgtcgaatccgagcagctgcttgatgcgtgcaaccgcgtggcggtcatcgaccaccacagaagagccgcgaattatatcgaatccgccgcgctcaacttccacgagccctacgcctccagtgcatccgagctcgtcacggagcttttgcagtatcttgccgacccgaccgatttacttcgcgcggagtccgaggcactgctcgcgggcatcgtgctcgacacgaagaacttcacgatgcgcaccggcgggcgcacgtttgaggccgccgcgttcctgcgccgcgcgggcgcggacacgtcggacgtacagcggctcttccagagcgaccttgccggcatggtcgagcgctatgacatcatccgtcacgccgagctcgttcacggcgacattgccgtggccgcggttgaaaaggagatcgaccgcgtgaccgccgccaaggcggccgacgagcttttgacgctctccggcatccacgcttcggtcgtgctttacaagcacggtacgggtgtgaatctgtccgcgcgctcgctcggtgagatcaacgtacagttcatcatggaaaaactcggcggcggcggcaactctactaccgccggcggccaggtggccgatgccagcgtcgacgaggtgcgggcgcgtctgctcaacgccatcgacgaatatatggaagagtgacgctcttccccacaacgtaaatcaccccacaaggaggaaacagatatgaaagtcattttaacgcaggatgtgagaggtcagggcaaaaagggccagctcatcgacgcagccgagggctatgcaagaaacttcctgctgccccgcaagctcgccgtgctcgccacggctgacgccatcaacaccatgaacctgaaggaaaaggcccgccgcgccgaggaggccgcgaaccgtcaggccgccgtcgaaatgggcggcaagctcaaaaatgtgaccgtcaagctcacggccaagggcggcaaagagggcaagctcttcggtgccatcacgagcaaggagatctccgagggccttgcgagccagtaccagctcgacgtgcccaagcagaagatcgtgctcgacgagcccatcaaggctttcggcccctacgaagtcaaggccaagctcggctacgaagtgagcgccaagttctccgtcagtgtgagcgaggagtaaggcgcaagattacgcaataaggaggtcttctcgtggaagatatcttctaccggcagatgcctcattcgctcgaggccgagcagtcggtgctcggctcgatgctcatcgacgcaaactgcgtcaaggacgtgatggagcagctccgtcccgatgatttttacttaaagcagaaccgcgagatcttcgagacgatctactccatgttcgtctactccaagcccatcgacggcgtgaccgtcgcgggcgagatggagaaaaacggcacctatgaggaaagcacgacgcgcccgtacctcgcccaactgatggacgtgacgcccacgagcgcgaacgtgatggaatacgtcggcatcgtacgcgacaaggcgctgctgcgcgcgctctataccgtggcgggggaaatttccaccatggtgcaggacggcacaggcggcgcgtccagcgtgctcgacgcggcggagcagaaaatttacgccgtgcgccgcgggcgcagcgcgcagagcatggcgagcatcggggttgttttgcagggcgttctggaccatctgagcgagctgagcgctaacggcggcaaaacgctgcccggcctccccacgggctttggcgtactggacgacaagatgaatggtctcaacaaatcggaccttgtgttgctggccgcgcgtcccggtatgggtaagacgagtatggcgctcaaccttgcgctgaacgtcgcgcgctcgagcgggcaggccgtggccgtgttttcgctcgaaatgtcgcgcgagcagctcgtgacgcgtatcttatcgaatcaggcgacggtagagaaccagcgcctcgtgacgggcaacctgcgcgagcaggactgggtcaacatcgcaaacgccgcatctgtcctctcggggcttgacattctcattgacgacaatccgctgctcaccgttgcggacatgaacgccaagtgccgccgcatcgacaatttagggctcgtcgtcatcgactacttgcagctgatggcgtcctccggcacgaagggctacagcggcgagagccgccagcaggtggtcagcgatatttcccgtatgctcaagatcatggcaaaggagctgcaagtccccgtgctgtgcctctcccagctctcgcgtgcgaacgaaaagcgcgaggacaagcgccccatgctctccgaccttcgtgaatcgggcgctatcgagcaggacgcggatatcgtcatgttcctgtatcgcgatgactactacaacgaggactcggaaaagcgcaacatcgccgagtgcatcatcgccaagaaccgccacggcgaaaccggcaaggtcgagctcgcctggtcgccgcagtatacgacgttctcgtcgctcgactaccggcatgaagaggactgagctgccgcgcgcggaagcgctctgcgcgcgctatctcgacaaaaagcagcccgtgctcgccgccgtgtccggtggtttggactcgatgtgtttactgcattttctgcgcggggaggggtatgacgtttcctgcgcgcacttcaaccaccagcttcgcggcgaggaggccttgcgcgacgaaaacttcgtccgcgcgtggtgcgaaaaagagggcattcctttctatccgggcaccggcgatgtgcgcgcccacgcgcgcgcgaccggcaaaaccgaggaggaggctgggcgcgacctgcgctacgcctttctccgcgaaacggcaacgtcgctcggcgcgcagatcgcgctggcgcaccacttagatgacaatgcggaaacggtgctcttgaacctcgtccgcgggacagatctgcgcggcttgtgcggcatgcggcccaggcagggcgacatcgtccgcccgtttttagagcagacgcgtgaagagcttgtcacctatgcgcacgctcacaacatcccgcatgtcgaagaccatacgaacgcggacccgaacgccgccgcacggaactacctgcggcttgaaattctgccgcggctcagggagctcaatccccgcgcgcctcagcatatcgccgcgacggcgcgctcattgaccgtgctcgacgatgcgctcgagcacgcggcggaagccgcactttcccatgcgaaagcacaggacggcggtatttcgctgtcgctggactgctttcttgccgccgatgaagtcgtgcagccacgtatcctgctgcacttggccgacgcgctcggcctcgggcgcaaggacatcgggcgcaagcagctcgacgcgatctgcgcccttgcacagagaggcggcagcgccgagcggcgctatacgctgccgcagggcgcgactgtccgcatcgcggacggttcgctgacgatggcgttctcccccgccgcgctgccaaaagcggcgcttgtggaaaacgttcccctcccatggggcaatttcgagctgacgctgttgcataagcccgacggcgagggcatttcgctccgcgcgccggaagacagcgaagtcatcaccgttgccccgtgcgacttgaacgcgcgcctgacgctcgatggcgcgaacggcgcgcgcagcgtgaaacgtctgtgcatcgaccgaaagctctctctcaccgagcgcgacgcgctccccgccctttacgtgggtggccagctcgccgccgtgtggcggctggggacggacgttactttcctgccggaaggcggagacgcagcgtgcttcgtgcgcatcattcccagataacgtcaatttgtgcgacctgcggcggaacgccgcatcagatacaacaaatacgaataaaaagaaagtggagaaaaaagctatggctaagagcaatatggatcaggatatcctgaaggtactgtattccgaggagcagctcaaaacgcgcgtacaggagatgggcgacgagctctacgagcgcctcaaggacaaaaatcccctgtttctcggcgtgctgaagggctccttcatcttcatggccgacatcgtacgcgcctgccagctcaagagcgacattgaattcatcgccgtctcgtcctatcagaacgcgacgacctcgtccggcgtcgtgcagatcacgcacgacctccagcaggacatcacgggccgcgacattgtcgtcatcgaggatatcctcgactccggcaacacgctctacttcctcaagaattactttatgaccaagggcgcttccagcgtgacggtcgtgacgctgcttgacaagccctcccgccgcaccaagcccgtcgttgcggacctcgcaggctttgaagtgcccgacgaattcgtcgtcggctacggcctcgactacgcgcagaagtaccgcaatatgccgtacatcggcgtgctcaagcccgaggtttacgccaactgattcaaaaaacagcaaacgctgttttttgagaaggctgcactccgctgcagcgcactcgctatcgctcgcacgtttgcggagcgagcggtgttatttccgacgcacttgtcgttggaaataacgatctcacattttttcacgcctgcgggcgtctggacagccgttagcaactctgctgctctacggatgtcgcgtgccccttgcgggcagaaactctgcgaggcttttatctttgcagtgcaaggaggatatcccattgactcaacagaccaagcgtcccaatcttttgccgtatctgctggtgctgctggtgctcgtcggcgtctacggctttatgaacaagccggtggaggccgaaccgtcgtatgccgaggtacgcgagctgttcgaatccgagcaggtctcggccttcacggtgacggacaccacgctgcgcatgaagctgcgcgagcccatcgacggcaaaacggagctcaaaaaggaccttttcagcgtgacgctcttctatgacgacttaggcgagctcatcgagcagcagaaggccgacggcatcatcgaggactacgacttcaccgccgaccactcgatcaactatgtcgcgatgttcgcgccttatattttagcggtgctcggcattttcgccatctggtacttcctctccgtccgctccgcgggcggaggcggcggcgaccgcatggcgaagttcggcacggcgtcgttcaagaccggcggagacaacaagcgccccacgacgttctctgacgtcgccggtgcggatgaggaaaaagaggaattgcaggagatcgtcgactttttgaaagcgccgggcaagttcatcgacctcggcgcgcgcatccccaagggcgtgctgctcgtcggccctccgggcacgggcaagacgctgctggcccgcgcggtcgcgggcgaggcgggcgtgcagtttttgtcgatctccggctctgactttgtcgagatgtatgtcggcgtcggcgcgagccgcgtgcgcgacctcttcgaacaggcgaagaaagttgcccccgcgatcatcttcatcgacgagatcgacgccgtgggccgtcagcgcggcacgggcctcggcggcggccacgacgagcgcgagcagacgctcaaccagctgctcgtcgaaatggacggcttcggtacgaatcagggcgtcgtcgtcatggcggcgacgaaccgcgccgacatcctcgaccccgcgctgctgcgcccgggccgcttcgaccgtcaggtctacgtggggcttcccgacatccgcggccgcgaggagattctgaatatccatgtcaagaataagccccttgccgaggatgtggacctctccaccgtcgccaagggcacgcccggcttcacaggcgcagacctcgagaacctctcgaacgaggcggcgctgctcgccgcgcgccgcggcagcaagctcatcacgatggctgatttctccgaggcggagatcaaggtcatcgcaggtcccgagaagaagagccgcgtcgtcagcgagcacgagcgcaagctgaccgcctatcacgaggccggtcacgccatcgtgatgcacgcgctgccgacgcacgaccctgtgcaccagatcacgatcgttccgcgcggcggcgcgggcggcatgacgatctcgctgcccacggaggaccgctcgtaccagtccaagcgctatatggaagagcagatcgtctcgctgcttggcgggcgcgtggcggaaaagctgatgctcggtgacatttcgaccggcgcgtcgaacgacatccagcgcgcctcgcagattgcgcgcaagatggtcacggtgtacggcatgagcgacaggctcggctcgatctcgttcgaatccggccacgatgaaattttcatcggccgctcgatggcgcaggccaagccgtattccgagcaggtcgccgcacagatcgacgaggaggtcaagtccatcgtcgacgcggcctacgagcgctgcgaggacatcctctcgcgcgatcagaagcacctcatcgccgtggcggaattcctgcttgcgcacgagacgatgagcgctgaggaattcgaggccgtcttcaccgacgaagccgccggccatgacaaaatctaatcctgttatgaataaaatatctcattagcaagccgctggtgagatattttttcacattttcgcaagaattcctgcatttttagcgtctctccccttgccaattcggtttcttctgctataatggggcattagtcattccatttacatgaaaaaaaagagagaatcgaacatgaaaaaaagcagtagtttcagcggctcgctcggctttgtgctggccgcggcgggcagcgcggtgggcgtcggcaatatctggcgcttcccctatctctgtgccaaggacggcggcggactgttcctgctcgtctacctcgtgctggtgctgacattcggcttcaccctgctgacgaccgacgtagccatcggccgccgcacaaagcagaatgcgctcaacgcctttgcaacgctcaacaagaagtggaagtttttgggctacctcaccttcctcgtccccacgctcatcatgatgtattactccgtcatcggcggctggatcacgaagtattttaccctctacctcgtctcaagcggcgatgccgccgcgcaggacgggttcttcacctcgttcatcacctcccccgtctcgcccatcgtcttcatgctgatctttttggcgctgacggcgtgggtcgtgtactgcggcgtggaaaagggcattgaaaaatactctcgctacatcatgccgggtctgctccttctcatcatcggcatcgccatcttctcgctcacgctctcttacaccgacgagagcggcatgacgcgcacgggtatcgaaggattgctcgtctacattaagcccgacttcacgggcctgaccgtccagcgctttttgaacatcgcgctcgacgcgatgagtcagctcttcttctcgctcagtgtcagcatgggcatcatgatcacctacggcagctacgtcaaggacgacgtcgacctcaacaaggccaacaaccagatcgaaattttcgacacgggcgtcgcgttcctcgcaggattgatgatcatccccgccgtctatgtcttcctcggcaccgacggcatggccagcggcccgagcctaacgttcatcagcctgccgaaggtcttcgccgcgatgggcggcgtgggccgcgtcgtgggcgcggtgttcttcctcgcgctcggcttcgccgcgctgacgagctgcgtgtccgtcatggagacgcttgtcgccaactgcatggagattttccacaagtcgcgcaaggagatgtgcgccgccgtgggcgtctactcgctcgtcaccgccgtgctcatctgccttggctacaacgcgctctacttcgagctcccgctgcccaacggctcgaccgcgcagctgctcgacgtgatggactacatcagcaacagcttcctcatgccgtttatcagcctgctcacgagcattttggtcggctggatcgtgggtccgaaatggatcatcgccgaggtcgagaaaaacggcgaacactttggccgcgccaagctctacagcgtgatgatgaagtacatcgtccccatcgtcatgctcattctgtttttgacctccacggggctcggcagcctgatcttcggcggcaggtaagaaattttggcaaaaaagggaacgcttgcgcgttccctttttttcttgcttttttgcctttttctccgttcaaagtacgcaaaatatgtttttccgccgcgcgtttttttgtcaaaagcgcaaatttctttttccctgcttgacaaaacgggggcgggcgattatagtagcatcattaaatctcatagttcacaaataccgtgacggggaaaaattcgtcccacagacgcttcagagagttgccggtcgctgcgaggcaatgcagagcgggatgatgtcactggcccctgagtagcttcgctgagacattcgtttaggcggagccggatctcctcaccgttaccaacgaggcgcattcgtttgattttcaagccgatgcagaaagcgggcatttcatatgccaacaagagtggtaccgcggaagttttgagctttcgtctcttcaagggaagagacggaggctttttttgttgctatgcgaaagaaaaaagcaggaggaacaccccatgaagcgcattaaaatttttgacacgaccttacgagacggcgagcagtcccccggctgtagcatgaatctgacggaaaaaatcgaaatggcccgccagcttgaaaagctgggcgtcgacgtgatcgaggcgggcttcgccatcgcgtctccgatggaccacaagagcgtgcaggccatcgccgccgcggtgacgaactgcacggtcgcctcgctcgcgcgctgcgccaagggcgatatcgacgcggcgtgggacgccgtgaaggaagccaaccacccccgcatccacgtcttccttgcgacgagcgacatccacatggagtacaagctcaagatgacgcgcaagcaggtcatcgaccgcatccgcgagatggtcgcctacgccaagagctattgcgatgacatcgagttttccgccgaggacgcctcccgctccgactgggcatttctggcccattgctactccactgccgtcgccgcgggcgcgacgacgctgaatgtgcccgacaccgtcggctactccacgccgcaggagatgtatgacctcatcacctacctgcgtgaaaacatcgagggcgtcgggcatgtcgacatctccgtccactgccacaacgacctcggcatggcggtcgcgaattcgctcgaatgcgtccgcgcgggcgcgacgcaggtcgaatgcacggtcaacggcatcggcgagcgcgcgggcaacgcgagccttgaagagatcgtcatggcgctgcgcacgagaaaggacttctacgacgccgaaaccggcgtgaacaccaagcagatctaccgctcgagcaagctgctgagcaacatcacgggcgtgcccatcccgccgagcaaggccatcgtcggcgcgaacgccttcgcgcacgagtcgggcatccatcagcacggcgtcattgccaatgcaagaacgtacgagatcatgaactccaccgacgtcggcatcccgcagaacacgatggtgctcggcaagcactccggcaagcacgcgctgcgtgaaaagctcgaatccatgggctacgaattgagcgacgaggagcttgaaagcgtgttcacccgcttcaaggatctcgccgacaagaaaaagaacatcacgagcagcgacattgaggcgctcgtgctccaccgccaggctgcggtgcagggcagctgccagctcgtgagtcatgtggtcaacacgggccacggcgtgccgaacatctcgtgcatcaagctccagcgcggcgacgagcagatcgaagatgtcgccatcggcacgggcccgctggacgcctcgttcaaggctatcaaccgcatgctccaaatggacgtgaagctcgagagtttcagcctgaacgccgtcacggacggcgaggacgccatcggcgaggccgtagtcaaggtctccggccccgacgggcggtcgtacaccggctcgggtctctcgaccgatatcatcgaatcgtcgatccgcgcctacgtcaacggcatcaacaagatcatggaatccggcaactgaaaggagaaacgagacatgggcatgacaatgacgcagaaaattctcgccaagcacgcaggacttgagagcgtgcgcgcgggccagctcatccaggcaaagctcgacctcgtcctcggcaacgacatcacgacccccgtggccatcaacgagtttgagtccgcgggctttgaaaaggtcttcgacaagagccgcatcgcgatggtgatggaccacttcgcaccgaacaaggacatcaagtccgccacgcagtgcaagcagtgccgcaccttcgcccgccgcttcgacatcgaccatttttacgacgtcggcacgatgggcattgagcatgcgctgctgcccgagcaggggcttgtcgccccgggcgaggcagtcatcggcgcagactcgcacacctgcacctacggcgcgctcggcgcgttctccaccggcgtcggctcgaccgacatgggcgcggccatggccgcgggcgagacgtggttcaaggtcccgtccgccatcaaggtgaatctcaccggcaagctccgtccgttcgtctccggcaaggacgtcatcctgacgctcatcggcatgatcggcgtggacggcgcacgctaccagtccattgaatttgcgggcgagggcgtcaagaacctcacgatctatgaccgcctgacgatctgcaacatggccatcgaggcgggtggcaaaaacggcatcttccccgtcgacgacgcgacgtgcgcctatgttgagggccgcgtggaccgcccctgggcagcgttcgaggccgatcccgacgcagaatatgagcgcattatcgacattgacctcggcaatgtcgactgcacggtcgcctggccgcacctgcccgaaaatgcgcacagcgcgcacgagggcagcgacatcaccatcgaccagatcgtcatcggctcgtgcacgaacggccagctccccgacatggccgctgccgccgcgatcctgaagggccatcacctggccccgaacgtccgcggcatcgtcatccccgccacgcaggcagtctaccgcgcctgcatgcacgagggctacaccgacattttcctcgacgcaggctgcatcgtctccacgcccacgtgcgggccgtgcctcggcggctacatgggcatcctcgccgccggcgagcgctgcgtttccaccaccaaccgcaactttgtcggccgcatgggccacgtcgacagcgaggtctacctcgcctccccggcggtcgccgcggcatcgggcattaccggccacatttctcatccggaggaggtcatgaacaaatgaatgcacacggcattgtccataagtatggggatcacgtcgatacggacgtcatcatccccgcgcgctatctgaacacccagagccacaaggagctcgcctcccactgcatggaggacatcgacaaggacttcatccaccgcgtcaaagacggcgacatcatggtcgcgggtgtaaacttcggctgcggctcgtcgcgcgagcatgcacccgtcgccatcaaagcgagcggcatctcctgcgtcatcgcggcgaatttcgcccgtatcttctaccgcaacgccatcaacatcggcctcgccatcttggagtgccccgccgcgagcgcggagatcgaaaacggcgacgaggtaacagtcgacttcgacaccggcgtcatcacagacgcgacaaagggcacgacgtatcaggccgagcccttcccgccgtttatcaaggacatgatcgcgcgcggcggcctgatggcctcgctcaaggcaaaggaggcggcgaaatgaacaagaccattgccatcatcaagggcgacggcatcggccccgagatcgtcaccgaggccatgggcgttttagacgccgtggccgcgaagtttggccacaccttcacctacgtcgacgcgccgatgggcggcaacgccatcgataaattcggcgtgccgctgccggattcgagtttagcgacctgccgcaacgcggacagcgcgctgctcggtgcggtcggcggcccgaagtgggacaatcagcccgccgccaaccgtcccgagcgcggtctgctcaagctgcgcgagggcatgggtctctatacaaatgtgcgccccgccaagatgttctccgagctctccgccgcctgcccgctgcgcgccgacatcgcggaaggcggcatcgacttcatcgtcgtgcgcgaactcatcggcggcgtgtacttcggcgagcaccgcacggaagaggcgaacggcgagcagaaggccaccgacatcatggcctactccgagcatgagatcaagcgtgtcgcgcgcgtcgcgttcgagaccgcgcgcaagcgccgcaagcgcgtcacctccatcgacaaggccaacgtgctcgacacctcgcgcctctggcgcaaaacggtcacggaggtcgcaaaagactatcccgacgtcgagcttcgccacatgtatgtcgacaacgcggcgatgcagctcgtgcgcgacccgagccagttcgacgtcatcgtgaccgaaaacctctttggcgacatcctctccgacgaggcgagtcagatcacgggctcgatcggcatgatcccgtcctccagcatgggcgacggcacgaacgggctctatgagcccatccacggctccgcgcccgacattgcggggcaggacaaggcaaaccccatcggcacgatcctggccgccgcaatgatgctgcgctacagcttcgacatggccgccgaggccgacgccatcgagcgcgcggtggataaaacgctgcgttcgggcttccgctgcggcgacatcatgcaggaaaactgccaactcgtcggctgcaaggccatgggtgcggagatccgcagccgtatctgaaacgatctcttccaaacttctttgtgaacctctcctttgatcctctgcatcgcgcggcgatgcgaaaaaggttcccaagccaatggcttgggaaccttttttcttccgctgttcagattttgccgatcagcacaacgatcccgccgaccgcggccgcgacaagaaggtacagcgctgtggccgcactgcgcttggtgacgaccgcccgccacggcttcacgtagggaaccccctccatgccctcgatacgccagatcttgctgtggccgacccacagcaggtcgatgacgaggccgtcgaaccagttcatcaccacgaggaaaaggtaggcttcaaagcaggcggtatggaagtccttcacgccgttccatccagcgatgatcgcgaccagcacggcaaagatcacaagacagaagaacgtcataaagcgcttgcccttgcgcagctcctcagtcttgtcggcgatgccgcgcttctgcgcctcgtcgagatacgcgtccgggtaaaaatagaggcagttgcgcccgctgtctcgcaccgcgcatttgaccagcgcgagatacagaagacaacataaaatgatctgaagcagtaacagcatggccgtgttctcctttgaaaaaagcttttaagatgcaaaaccggcgctcagtgcagcttcttccccatttcgatccgcacctcgtgccgttcaggatcgtcgttggagtaggcgtacaggtcgaaaccgacgatttcgaaaccgttctttttgtaaaacgcgatggcgttttcattgcacgactgcgtctctaaaatcagcatgcgcgccccggcgtcttccgctgctcgctctatggtcttcatcagcgccgtgccgacgcccctgctgcgttcggaaaagtccagcacgcagatgttgctgatgcggaagcggttgttccagccctctattgagccttcgacatatccgatcagtttttcgccctcgaacgcgccgaaggcgatcgggtcttcgagccattcgccgaagaatacatcgtcgaacgatctctcagtcggctccgcaaagggtacatagtccatctgaaagcccgtctcggacgggcggatctcataataaccgtttgtgcggtagcgggcggtaaacgttttgcccgcatacgtctccctatccaagggtttgatctccatgcactctcccctttcccatccaacatctgattggtccacatcctaccacatctttttacaaagtacaagcgcccagccgaatggctgggcgcttgtttgattcaataaaagcctatgccgaaagcgatttgcttactgcatgtccttgatcgcagcctgagcggcggcgaggcgggcgatggggacacggaacgggctgcaggagacatagtccaggccgaccttgtggcagaactcgacggacgtgggatcgccgccgtgctcgccgcagatgccgaggtggatgtgcgggttggtctcgcggcccatcttggcggccatggagacgagcttgccgacgccggtctgatcgagacgggcgaacggatcgctctcgtagatcttcttgtcgtagtacgcgccgaggaacttgccggcatcgtcacggctgaagccgaaggtcatctgggtcaggtcgttcgtgccgaaggagaagaagtccgcttccttggcgatctcgtccgcggtcagagcggcgcgcgggatctcgatcatggtgccgaccttgtacttcatagagctgccggcctcggcgatcagcttgtcagcgacctcgacgacgacgtccttgacgtacttgagctccttgacctcgccgacgagcgggatcataatctcggggatgatgttccagtcgggatgcgcggcgttgacgttcagcgcagccttgatgaccgcacgggtctgcatggcagcgatctcggggaacgtaacggccagacggcagccgcggtggcccatcatggggttgaactcgtgcagggaggcgatgatgttcttgatgtcctgaacgctcttgcccatgtccttggcgagctgctcgatgtcagcttcctcagtgggaacgaactcgtgcagcgggggatcgaggaagcgaacggtcatcggacggccctcgagcgcgatatacatggcttcaaagtcgccctgctgcatcggctcgagcttagcgagcgccttctcgcgctgctcgacggtgtcggagcagatcatctcgcggatggcgggaatacggtcagcctcgaagaacatgtgctcggtgcggcagaggccgatgccctcagcgccgaacttcacggcctgctcggtgtcgtgcgggttatcggcgttcgtgcggacgcccagacggcgatacttgtcggcccaagccatgacgcggccgaactcgccgccgatggtggcgtcgaccgtggggatgatgccgtcgtagatgttaccggtggagccgtcgatggagatgaagtcaccctcgtgataggtcttgccggcgagctcgaacttcttgttctcctcgtccatgttgatctcgccgcagccggagacgcagcacttgcccatgccgcgcgcgacgacagccgcgtgggaggtcataccgccgcggacggtcaggataccctgggaggccttcatgccctcgatatcctccggagaggtctcgagacggacgagaacgaccttctcgccgcgctccttccactctttggcatcctcagcggagaagacgatcttgccgcaggcggcgccgggggaggcgggcagagccttggcgatggcgggagccttcttgaggacagccgcatcgaactggggatggagcagggtgtcgaggttgcgcgggtcgatcatggagacggccttcttctcgtcgatcatgccctcgtccacgaggtcgcaggcgatcttgagagcagcctgcgcggtgcgcttaccgctgcggcactggagcatatagagcttgccgttctcgacggtgaactccatgtcctgcatgtcgcggtagtgatcctcgagcaggtcgcagaccttgacgaagtcggcgtaagcctgggggaacttctcttccatctgggagatgggcatcggggtgcggacgccggcgacgacgtcctcgccctgagcgttggtcaggaactcgcccatgagcttcttctcgccggtggcggggtcacgggtgaaggcgacgccggtaccggagttgtcgttcaggttgccgaagaccatcggcatgacgttgacggcagtgccccaggaataggggatgtcgttgtcgcggcgatagacgttcgcgcgcgggttgtcccaggagcggaacacggcgcggatggcttcgtacagctgggtcttggggtcggaggggaagtcctcgccgatctgctgcttgtactcggccttgaactgctcggcgagttccttgaggtcggctgcggtaagctcgatgtcgagcttgacgccgcgcttttccttcatcgcgtcgatgagctgctcaaaatacttcttgccgacttccataacgacgtcggagaacatctggatgaagcggcgataggagtcgtaaacgaaacgctcgaagttggggtcggggttgcccgcgatcatggcggcgacgacgtcgtcgttgagaccgaggttcaggatggtatccatcatgccgggcatggaagcgcgcgcgccggaacggacggagacgagcagggggttcttcagatcgccgaacttcttgccgttcatctcttccatcttcgcgacgtattccatgatctctgccatgatctcgtcgttgatcttgcggccgtcctcgtaatactgggtgcaggcttcggtcgtgatggtgaagccttggggcacgggcagaccgatgttggtcatctcggccaggttcgcgcccttgccgcccagaagctcacgcatggtagcgttgccttccgagaacaggtagacatactttttgctcattggttttcctccattaaaaatgtatcgctgtgtgatcattatcaagccatattattatagacagaaaatccccgactttcaataacaagttgtgaaatttttgtcgactttccgcattttttctcccgcaaaacgcaatttggcgcaaaatcgttctgtttttccgtcgcggggcgcggattttcttgcaagcgccgcacttttgcgatatactatttttaaatttgcgctgaaaatgcgcgcagagtacagagcatggagcgggcaatggagcttttggattttgcaaaaaccgatacggcggcgcggcttcgcgccgcggcaaagcgcggcgcactgtcgcacgcactcattttcagcggcagcggcgaccgcgtgagcgctgcgcgctatgccgccgcggcgatggagtgcacagcggaaagcaagccctgcctcgcctgccctgcctgccgcaaggtaatgcaggacatccaccccgacgtcacgttcgtgcgcgacgcagagcacaaggagctctcgatcgacacggtgcgcgcgatgcgcgccgacgcgttcatccgcccgaacgagggcgcgcgcaaggtctacattttcgaggactgcaccatcctgacggaaaaggaccagaacgtgcttttgaagctcgtggaggaggggcccgcttacgcagcgttcttcttctgcgcggaaaatccggcggttctgctccagaccatccgctcgcgctgcgtggaggtcaagctctcccccaccgtcgaagagggcggcgcgcctgacgagcgcgagatcgagctcgcgcggctcatcgccgaggggtcgcgcgcgtcccgcgcggcattcctcgcaaagctcgaaacgcagaaggtcacgcgcgacgacctgtcctcgcttttcgagggaacgcggcttctgctctcgtccgccctgctggggcagtacggcgtgagcgtgccggaagatgcgcttcgcatcgcgcggtcactggcttcgcgcttgacaaaagccaaattactcggcacaatagatttattgcaggactaccgcaataaatgcacctataacgtcggcgtcgggcccacgctgggcggcttcgccgttgaattggaggaaaccctttgacagaagtgatcggagtccgcttccgcggcggatgcaaggaatattattttgacccgcacggcatcacggtcgaacccaaccagttcgttatcgtcgagaccgcgcaggggctcgagtacgcccagtgcgtctcgggcaaccatgaggtggaggacgattccgtcgtccaaccgctgcgcccgctcgtgcgcgtggcgacggagaacgatgaccgcacctacacctacaacaaaacgcgcgaaaagaacgccttcgaggtctgccagaagaagatcgccgagcgcgggcttgacatgaagctcgtgcgcgtggagagcaacttcgacggcagcaagatcatctttttcttcacgtccgatgggcgcgtggacttccgcgagctcgtgcgcgacttagccggtgtgttccgtgcccgcatcgagctgcggcagatcggcgtgcgcgacgaggcgaagatgctcggcggcctcggcatctgcggccggcctttctgctgctcgcagtttttggacgacttcgtccccgtttcgatcaagatggccaagacgcagaatttgagcctgaacccgacgaagatctccggcacatgcggcagactcatgtgctgcctcaaatacgagcagaacgcctacgaggacgcggtgcgccgctgcccgaagcaggattcgtttgtcgcaacgcccgacggccttggcaacgtgagctcggtcgacattctgcgcgagcaggtgctcgtgcgcctcgacgggcagaacgagagccccaagcgctaccgcacctgcgaaattcaggtgcttcgcaacggcaagggctcgcgcgacggcatcgaactccccacgacgcttcccgagcgctatcaggaaccgccggaggagccgcagctgacgctgaacttcttctcgtctgccaagcccatcgtgccgcccgaacagtggacggcccccgtcgcgaaagcggacgcccccgtcgctgacgaggaggagaaagaaaagcgccgttcccgccgcggcggccgcggtcatcgcggcggcagaggccgcggcaagggcagcggtgaaggcggcgagaagtccgccgcgccgaagagcgaaaccgcaccccaaaagggcggcgacaagcccgccgaaaagcgaagcgaacgccccgcgcgcggcgataagccgagcagcgaacgtccgccccgcaatcccgacaagaacggtgagcgccgcgccccgcgccagagcaagccgaacagcgaaactcccgacgcgccgaaagccccgcgtccgccccgcccgccgaaagccgagggctcgattgagggcggcgagaacaagcagcgccgccgcagccaccgcggcggcagaggccgccgcagaagtggcggtcagagcggcgaaaatcccgcgccgaagagcgaagcgtaaacaagaaatagaaccgccgcgaagcacagttgtttcgcggcggttttgccaaaaggcggaaaggaattgcttccatgctgtaccatgcctcccccaccggcggtctcaccgtcctcacgccgcacgtctccaaccatggccacccgctcgtctatttttcgaagaaacgggaaaatgtgctggtctatctgagcaatgccgttgaaaaatactgccgcgacaccggctttgtccacacgggccggtgggaaaaatgggggccttacggcttcgacttagacggcgtgcagcggctggaggaatactaccccaacgcactggaggagacctatgccggcgtctccggctatatctacggcgcggaaccggcaaataccgcccctgtttccgacgtgccgttcgcggtcacgtccgaagaggcggtagcagtcgtctcgtacgagttcgttcctgatgcctatgaggccattctccgcgcagagcgggaggggctgctgcgcattctgcactatgcgcagaccggcgatccgttccgcgcctggatatggcaaaccatgaaacatgaatacgaaaatgccgaaaagcagcccgactaccgtcattttatcaaaggaaaattcggcatcatcggctgatatctttacgcaaaacatcccttttcatttctcccgcgccgtggtatactttcgtcgaaaaacaacgagagaagaagagaggaacaaccatgctgaaattcaacaaggtgctgctcgccagcgactttgacaacacgctcgtctatacgcagggcgcgctcgagcgcggtgaggacatcccgccgatgagcgcgcgcaaccgcgaggcggtcgagtacttcatccaaaacggcggctatttttcgatctccaccggccgtgcgctgcccgcctttgcccgctacgccaaggatctgccctgcaacgccccctgcgtcatcgccaacggcgcggccatctatgacttcaacaaggactgctatgtggagaccgcgtttttagacgcggacatctacgaccatgtcgacgcgctgctcgcgcgcttccccggcctgtgttttgaaatttatcacgatgaccgccgcatccacgtcctgcacccgaacgactacacgcgcaaccacgagcacctgacgcgcgcgaagaccgaggaggtcaaggacttccgcgaggtggacctgccgatcatcaagctgctctttgaagaggaaaagccgcttttggagcaggtgcgcgattttattgtctctcgggactggggaaaacgctacgagctcatcttttcgagcgatcacctgcttgagctgacgcgccgcggcgcgacgaagggcggcatgatcttaaagcttgccaagctcctcggcgttgcgcgcaaggacatctactgcatcggcgaccacaacaacgacattccgatgctcgaggtctccgagattggcttcgcgcccgaaaacgccatccccgaggtcaaggaatggggtgcgcacatcgtctgccactgcaaggacggcgcgctggcggacgtggtggatatcctaaaccatcgctattaacttcaaaaaagcggcagagccgcttttttgagggggatcacactccgcttcgtgccttgccgcccgcagggcggctgcgacacgcgcagagcgagaagaataaatcgccacgcacatgtcgcggcgatttatgatcgaaatttatttcgcgtctgcggacgcgaaagtctgcgacgctttttgatcttgcagatacaatgtccctcttgcgcgtaaaaatctgcgagacgcttttttatcctctgctgtcctttttcgtacaacttttcgtttgctcgcgcatataatagccgggtgagagaaaagctgaaaggaatggtacaatgaaggaaaaagacaacatccgtcatggcgacgtggacgacatgatcttcggcagcgaggcgcatgtcagcgaacgataatatgccaaaaggctccgctttcgcggagccttttctcacttttataacgccttttcgatcgtgccgccgccgaggacctcttcgccatcatagaagacgacggcctgtcctgccgtgacggcgcgctggggcgtgaggagctcgacgtgcgcgcagccttcttccagcggtgtgacgacggcgtcgcactctttctggctgtagcgcgttttggcggtgcaatagactttttccgcaggcgtctcccccgcaatccagttcacgcgcgaggcgagcagcgccgaggaaaacagttcctcgttgtcgccgagcagcacggtattattttcggcatttttggatatcacatagagcggacggtccgcgctcacgccgaggcccttgcgctgacccgccgtgtagcactccaaaccgcggtggcggccgagcacgcggcccgtttcgtcgacaaagtcgccgggctgcggcgtgacgccgccgtagtcgtgcagaaagcgcacatagtccccatcggggatgaagcagatgtcctgtgaatcggcctgatgggcgttttcaaagcccgcttcctccgcctgttcgcgaatttccggcttttcaaagctgccgaccggcagcagaagatgcgatagctgttcctgcgtgagctgatagagcacgtagctctggtccttcgcgcggctctcgccgcgcagcagccggtagcgtccgctcgcttcgtcatagccgacacgggcatagtgccccgtcgcgatgtagtcaaagcccatctccagcgcgcggtccaaaaatgcaccgaatttgaggcagcggttgcagtcgatgcacggattcggcgtgcggcccgcgcggtactcgctgacgaagtgatccatcacctcgcgcgcaaaaagctcgtgctcgtcgaagatgtaaaacggcataccgagaccgtcggcaatgcgcttcgcgccgtccgtctcgttgccgcagagcgacagcgtcgcgcccgcgcactcgtagccctgcttttgcagcaaaagcgcggcggcggaggaatccacgccgccgctcatggcgatcaaaacttttttcttcatctgtgtcccttaatccagatacttttgcagaaatgcctcgctcgaaagcgcgtcggacatctccacgagcgtgcggttgaagccgccggcgtagtcgctgccgcgatccttgagctgtacgcgcccggcctttaccgcagggagcgagacggtgaagagcgagccctttccctcctccgactgcgcgacgatcatgccgccgtggccctgcgcgatgcgctggcagatgggaaggcccagtcccaagccgcgcggcggcatggggtcctgcccgccgtccataaagcggtcgaacaaatgggccagcgtgtcgctgtccatgccctttcccgtgtccgccacggtgatcttgacaaatctcccctccgttttcacgcgcacgcggacactgccgcccttgggcgtaaatttaagcgcgttggagaggagattcagcagcagcttgcggatggcctcggcgtcgagggcgatgatgcggctgtcgcggtcggcgaggaagtcgagctccacgccgcgctgcgcaaaaaggaagtccacctcagcgcacacgctgcggcagacgccgacaatgtcgtcatcgtagagctcgaaacgcttgcgctcgaacaggttccccgcgtcagtcagattgctgatgaggcggtagagctggtaatagctctggtaaaatgccgcggcggtgcggtcagtcttcgggtccttctcccgcgtctcctgcggtgccaggcggtcgaccgccgtgtagatcgtcgaaagcgaggtgcgcagctgcaatgcaatattcggcagcacatccgacagcattttcagttcttcttcagtataatcccgcatagcgtctcctaataaaagttctcctaccggtagcattcaccgcagggaggcggagtttgcgcggaaagaattggtgttttcgcgataagctcgcgcttagaacgttttgttgtacagcgttgtagtatgagggtagcaaaatttcggtcaaaaagcaaggaatttgtggaaattatgaaaaaaatagagtttttgcaaaaaaggacttgcaaaacgaaactactgctatataatatctaaatgtaccaaacattcgatatattccgataagcaggaaggaagtaagttttatgagtattaaggtcggtattaacggctttggccgcattggccgtatggtctttcgcgcaagcctgaaccatcctgagatcgagatcgtgggcatcaatgacctctgccccgccgattatctggcctacatgctgaagtacgatactatgcacggcagattcgccgccgatgtgaagagcaacgactacggcatcgtggtcaacggccgcgagatccccgtcttcgccgagcgcaaccccgcggacctgccctggggtaagattggcgcggagtacgtcgtcgaatccacgggcctgttcctgacgaaggaaaaggcgcaggcgcacatcgacgccggcgcgaagaaggtcgtcatgtccgccccgtccaaggatgacacgccgatgttcgtctgcggcgtcaacctcgattcctacacgagcgacatgcagttcgtctccaacgcctcgtgcaccacgaactgcctggcccccatcgccaaggtcctgaacgactgcttcggcatcaaggatggcctgatgaccaccgtgcactccgtcaccgccacgcagaagaccgtggacggcccgtccctgaaggactggcgcggcggccgcgcggccacgggcaacatcatcccctcctccaccggcgccgccaaggccgtcggcaaagtcatcccctcgctcaacggcaagctgaccggtatgtccatgcgcgttcccacgctggatgtctccgtcgtcgacctgaccgtcaaccttgaaaagcccgccacctacgatgagatctgcgcggccatgaagaaggccagcgagggcgagctcaagggcatcctcggctacaccgacgagcaggtcgtttcctccgacttcctcggcgatacgcgcacgtccatcttcgacgccaaggccggtatcgccctgacggatacgttcgtcaaggtcgtgagctggtacgacaacgagatcggctactccaacaaggtgctcgacctcatcgagcacatgtactcggtcgaccacgccacgaagtaacttagctttttcctgttcctgtttttgggtaaaaacaggacggtgctcctctgagacaagagggatctggtgcgagatccctcttgtttttttcgcgttttcggtggtatactgccatcgttgcaaatttttctttgaggtggatcatgtttcaaggttttacgcccgaggccgtcgagttcctctggggcatcaaattcaacaacaaccgcgagtggttcctgccgcgaaaggagcagttcctcgcgctcgttgaccggccgatgcgcgagctcggcagcgaaatttttgacgcgatcgccgtggaatatcccaagcagtcgctgaaattacacgtctgccgcatctaccgcgacgcgcgccgtctcttcggcagagggccgtataaggaccacctgtggttcacgatcgagcgcccgcacgagcgcttcgagggcgtccccgcgctgtatttcgagctcgcaccgaactacttcagctacggctgcggctactgggacgcctcccccgccacgatggccaagctccgccgccgcatcgagaccgaccccaaaaagctcgaaaagctcgtgcgcaagctgaataagtcccgcttcacgctctccggcgagcagttcaagcgcccgaagggcgacgtcggcaagctcctgaacccgtggtacaacgcgaaaaatatcgccgtcggctatgacgacaatcccgaaggcgtgctgttcacgccggagctcaaagacgaagtcctcgcgggcttccgcgagctgatgccgctgtatctgtatctcgattcgctggcgggcgatcctgaaccgaataaagaataatgccgctcgcagagcggcgggataattccctgcgccgcgcaggggagtgcggtaaaagggggcattctctcacgtgagagaatacccccttttgatcccccaagagaacggcaggggcgtttcgatctcgcccctgcacccctaacgaccaaaagggagggaccttgcccctcctttttggattatcttccccgctgttgcttctgacggcgcggcattgctgcgctcgccgcgttcagaattgcttctattttagttctgtgctgtgatatagatctcttctgtcttttgttgagcggagataagcagttcttttgcatcaccgtagttttgcacttccattttttcgagtgcatcggtcactgcgttgaatagcgtggtgtacattttctgatagtcagtcattacagacacctccttaacccttttcggttattttaacccaaaagagttaatcttttcaagaggaaaacgatattctttatgaaaagaaagcggggtggtcgtgatgacagtgggtgaagccgtgcggcggcgcattttggcgctgtgcgaagaacgaagtatcacaatcaaccgcttgagcatcctcagcggcgtcacgcaatccacgcttaataacattatgagcggccgaaaccacacgacgaccgtcgcaacggtcaaaaagctctgcgacggcctgaatatcaccgtcgatgaatttttctgccccgaatacttccacgatctcgaacaggaattaaaataaaacgaccgccactgcggtcgttttattttatgcggcgagcgaagcaatgccgcttcggcaggcattatcgagacggcatcatccgaagcaggcgcagttcttaccggaagtaccacagggaggataatccaaaaaggaggggctacgcccctcccttttggtcgttagggggtgcagggggcgaagtcgaaacgccccctgcctttctcttgggggttccaaagggggaggttctcttttgaaagagaatctccccttttgccccgtgcagcgccgatggcgctgccctccccccgcactttcgtgcagaaaatcaaaaagcgacggcttttcagccgtcgcttctctatctgcattactgcaaaacctttttgttgccgtgggtggccttcatgcgcagctctttgttgaggatcgtcttgcggatgcgcagagacttcggcgtgacctcaagcagctcgtcgtcggcgaggaactcgaggcactgctccaggctcatctgcttgggcgggacaaggcgcagcgcgtcgtccgagccggaagcgcgcatgttcgtcagctgcttcttcttgcacacgttgaccgtgatgtcctcctgcttgggggactgaccgacgaccataccctcgtacacgtcgacgcccgcgccgatgaacagcacgccgcgctcctgcgcattgaagaggccgtaggtgatggacgtgcccgtttcggaggcgacgagagagcctgtgttgcggcgggcaagctcgcccttgtagggtgcgtaggaatcaaacacgctcgccatgatgccctcgcccttggtgtcggtgaggaactcgttgcggtaaccgaacaggccgcgcgcggggatcaggaattcgagcttcatgcggctgccgatcggcgtcatctcggcgaggtcgcccttgcgggagccgagcttttcgatgactgcgccgacatactcctgcggcacatcgcacacaaggcgttcgatgggctcgcacttcttgccgtcgatcatctgatacaggacgcgcgggggcgagacctggaactcatagccttcgcggcgcatggtctcgatgaggatggacagcgacatttcgccgcggcccgcgacgttgaacgcgtccgtcgagccctcgagctcggtgacgcggagcgaaacgtccttgagcgtttcgcggaagagacggtcgcgcagctggcgcgaggtgacgaacttaccctcacgtccggcgtagggagagtcgttgatggagaacgtcatctccatcgtgggggcgctgatcttgacgaacgggagcggctcgacgcactcgggcgcgcagatcgtatcgccgatcgtgatgtcgccgatgccggacaggcagatgatgttgcccgcggtggactcggtgacggggttcttggcaaggccctcaaattcgtacatggagacggccttggccttcttcggcgcggcgtcggggtcgtggtagttgcagaccatgatctcctggttctgcttgagcgtgccgcgctcgatgcgaccgatggccatgcggccgacatactcgttgtagtcaatggcggagacgagcatctggaacggcgcgtccacatcggcctccggcgcggggatatactcaaggatcgtgtcgaacaggggctttaagtccgtgccgacgacgtcgggcgaataggacgccgtaccgttgcggccggaacagaacagcatcggggaatcgagctgctcgggcgtcgcatcgaggtccatcaaaagctcgagcacctcgtccacgacctcgtggatacgctggtcggggcggtcgatcttgttgacgacgacgatgacacggtgacccagctccagcgcgcgggagaggacgaagcgcgtctgcggcatggggccctcagcggcgtcgacgagcaggatgacgccgttgaccatcttgaggatacgctcgacctctccgccgaagtcggcgtggcccggggtatcgacaatgttgatcttggtgtcgccgtagcggatggcggtgtttttggcgaggatcgtgatgccgcgctcacgctcgaggtcgttcgagtccatgacgcggtcgacgacctcctgattttcgcggtacacgccgccctgcttgagcatttcgtcgacgagggtggtcttgccgtggtcgacgtgggcgatgatggctacattgcgaagtttttcattctgcataggtgatctctccttcctgccgctgggcagggatatcaaatcgtaagtctttaactgtaatagtatattctgccgcttcgtcatttgcaagattttttgaaactttttttgtctcttttgcagaaaaattaggaaaagaggctgcctgtcctctcgggcaggcaacctcgcacagtttttacccgcaaggggtatgggcatccgtaaagcagcaaagctgctaacggttgcccaagtgcccgcaggcacaaatgttcttgatcgttttccgccgcaaccggtgcgtggcggaaaacaccttgcgcatagtggaaaccagcgaagcgccgccagtggcggaaacagcgagctgggttcgaggaaacggcacgattggcacgcctgcaagggcgcgccaatcgtagtgccgcaacggtgcaaagtcgaatcgcccgttttaacgggcaaccgaggcgcaaagcgacgtgaaacctgctcaaatcagtggttcaccactgatttgaaggcgtcagcccagcaatgcactcagttcgtcgatcagctcgccgaacagcgacagcgcgtcgttgacgggcgcgctcgtgcgcatgtcgacgcccatgtcgcgcagcagctcgaccggctctttcgagcagccgccggagaggaacttcttgtagtccttgacggcgctctcgccctcgcgcaggatgcggttggcgatggcgacggcggcggagaaactcgtcgcgtactggaagacatagtaattgtagtagaagtgcgggatgcgtgtccactcaagcgcgatctcgtcgtcggagatcatcgtatcgccgaagtagagcttgttgagcgctaaatacttcgcgctcagcgcgtcggcggtcagcgcctcgccgctctcggccatcttgcccatttggagctcgaactcggcgaacatcgtctggcggtacagtgtacccttgaactggtcgaggaagtggttgatgagatacgcgcgctgcttgcggtcgtcggtcttgccgagcaggtggcgcatcaggaggatctcgttgcaggtcgaggcgacctcggcgacgaagatgacgtactctgccgtattcaccggctggtatttgcaggagtgccacgtatgcatggcgtggcccatctcgtggacgagggtgaacatgctgtcgaggttatccttgtggttgagcagcacgtaggggtggggccagccgttgccggtgcagtaggcgccgccgcgcttgccggtgttctcatacacgtcgagccagcggttgctaaaggcctcctcaagcacgtctgtatagtccttgccgagcaccgcgagtgcttcgagcgtggtcttcttggcctcttcaaaggagatttcaacgtccgcgtccgcgacgatcggggtgtagacatcgtacatgtgcagctcgtcgacgcctaagatcttcttgcgcagctcgacatagcggtacatcttgtcgaggttgccgtgcaccgcgtcaatgagattcgtgtagacctcgaccggcacctcggtcacgtcaagggacgcctcgagcgtcgaattgtagcggcgcgcgtcggcgaagaacttgagctgcttgaactgcgcgtccagcgtggaggcgtaggtgttgcggaactcgcccgcgcgcttgtagtaggccttgaaggcgttttcgcgcagcgtgcggtcggcgctcatcagcatggggacgaacgtgccgtccgtcagcgtgtggacctcgccctttgcgtccgtcacgtcgggataacgcatgtcagcattgtggaacatgctgaacgtgcggtcagggctttcgctgatctcgcccgcggcggcgaggatcttttcgcactcgggcgagaggatgtgcgccttgcggcggcgcagcttgtcaatgttgcggcgataggtctcgagcttcggctcctcggcgtagaagcgcgcaagcgtttcgtcagggatggccatgatctcgctcgcttcaaaagagcccgcgctgttcagcgcgaccgccgtggaaaacgccttgctgcgcatgccctgatagaaggaattgcccacgtcctggtcgctgcggcagctcgcgtactgcacaagcttcgaaacgcgcaccgtgatctcatcgctgagcgtgaaccagtcgagcagcgtcttcgcgctctcgccgagcttgccggcgtaggcggccatgcgctcgggataggccttgagcgcttcgagctcctcgttccacttatcatcgctcgcaaatatgtcgcttaaattccaggtgaactcctcgggcacctcgctgcgcgggaggatcgtctttccgtccataggtttaccgtccttttctcaatatttctcactggttctgtccgccgtctgcggtcagagccgctcttgcgtcccattataacggacggcggcagtgaatacaagcgcttttctccaccccgctcccagcaaatcaggcattgacaaatccactgccaaaagggtaaaatatttttatcatccgcgtctgtagctcagttggatagagcgcgagcctcctaagcggcagatggttcgattcctttgagccttgaaaattgcataaagcttataaatgtctcagtagctcagctggatagagcacgcgcctcctaagcgtggggtcggaggttcaaatcctctctgggacgccagaaagcaccgctgcaggcctttttcggggtttgcagcgtttttttgttcctccttctcccggtaatttcacttccgttatcgggagatttttatgcgccgcatgatgtatatttgctaattggactcgaacgcttttcagaaatttgctaagaaaattctgcgttttgctaattcgatttttcggatcactttgccggggcttgcgccgctatcagggctgcgagcgcacttgccagctccggcgacttctgaagctgctccacaaggctttcaaggtccagggtcgcaggctccaattttaccggttcttccggtggacggacgttgcgaagatcaggcttggcatagaaggctgtctcgaatttctgagcattgacctttctatcctcgtccagaatgtgagcatagatactggttatcatgtcgatctcagcatggcctgtatcgccctgggtggctttcagatcgccgtggttgagttttaatttgtaggtggtactagaatgacgaagagaatgaaagaccaccttcggcagccctgcgtcctcacggagctttgcaaattctttgaggatgatacgatcctcgcagggccgtccattgggaagtgccacaaccagatcgaagtcctgatactcgtcacccaggaagcctttcagctcgtcctgggacttcttccattcccgcagaatgtaagccagcgttttcggcagccacaccttacggatactggaatcggttttcggctttttcagaacaattcttgtgctggtgttcggcataagcggagtgaagatgtagtagatatccttctcacccagcgtttcaatcgcccgtttggaagccctcgtcagctccttgtcgatgtagacataggcattatccgccgcaatatcttcatctgaaatatggacgttctcccaggtcagtcccaggatttcacccatacgcagagaacaggcaaaggaaaggttcattgctacatagagtttgctgtccgtgcatttgtccagggtaagacggatcatatccgctgtccagatatcccgtttcgcatactccgttttcgggaggatcacattgtcaaagggatttcttgcaatgatttcccatcgtaccgcctgcttgaatgcacagcggagaagtttgatgatcttttcaatggtcttgtcgctgacataggtggtaacggcctttcgggtcttggtacggtacaatccctcacttaaactggcgatcgatattgcaagggttgtcgaagcgccgatcgaagaaatctttgttttccagtgatctgtgcggaactaaccggccgacagtaaatgacggtgtactgcacggcatgaaatgagatagctggcttctaagcgtcagtccgccagttagcgtctggtcgggatgccaaaaggccctggaagcgctgcttccagggcctttttattttctcttattttatcgcactgggcggggctcacgcctgcatatcggtctgtctgcggtagctgcgcaggaacaggagtgacatgacaaggcacatcgcctcggaaagaacgggcgtgtaccagatcgcctcgccgccgaacgcggcggcaagcgtcagcagcaccgcgctttgcagcgcaaggccgcggccgacggaaatgctgatagctgggacggggcgctcaagcgccgtcaaaaagcccccgatgacgatgttgaagccaaggaacagatacgaaacgctgtaatgccggaacgcgcgcaccgagtacgcgaccagctcctcccccgcatgcgagaggtagaggcgcacgagctgcggcgcaaagacgtaaagtacgaggaagagcaccggcgcggcgatacaaacggtcgtgagcgcatagcgcaggagctttctgcacgcggcgcggtctccccttccgtactggaagctcacgagcggctgcgagccctgcgagatgccgaccatcagctggatgatgagcgacgtcacataggcaatgaccgtgtaggtcacaacgccgtccgtaccaatatatttgagcaccgtgcggttgaagaggaagatcatcagtcccgtgcacagctccgtcacgccgtcggcaaggccgatgggcaggatgcgcgcgtaaaggtgcggatcgaagcggaatttgcacagccggaacgtgcactttttgctgaaaaagtgcgcaaagtacgagaggcaagtgacaagctgtgaaatgcccgtggcgactgccgcgccgaaaacgcccatgtcgagccagaaaatcgcgatatagtcgagcacacagtttgtcaggcacccggcgatgacggtgaagagcgcgtagcgcgggaaaccgtccgtcttgacgagcacctcaaggttgtaggacaccagatagcacacgctgaacggcgcaaggccgagaagataatgcttgacatagtcgagcgtgatctcgtccgcgccgagaaggcgggcgaacggctccaaaaacagcagcacgagcgccgttacgaccgcaccgaggatgagcagcgtggcaaaattctgtgaaaagagggtgttggcctcgtgccgtttatcctgcgcgatggcaatggcgatcagcgtggacgagccgacggcaaagagcacggcaatggaaaacagcgcgttggtaaaggggatggcgaggttgacggcgctcatggcgtattcgttaacgccgagggagaccatcaggccgtcgaccatcgagtagagcgagaataccacctgtgaagccacggtggccgaaacaaatcggacaaagtcatgtttcagacctttgcctgagagtaacaaaataacacatccttaaattataatattttattatgcgttgatctgaccgatcccaaagctccctgcgcggagggctgccgccgcatcatagacggggcgcgccataagcgtcaccgtccgtttccggcgctgcaaaacgcgtgcggtcatgtcctgaagaagtgactcacctccatagaaaaaatctccttccagcatttggtgtgatctgaaaacgccgtctgcggccaaaagcggccaaatataagaaaagcagccgcaaaaacggctgtatcttcgacgccaaggcggcttttgatcggtctgtagttttattgtaccataggtttgccggttttgcaatcacctgtgcaaaaccgaaacacaaacgaaacacctgctctcaccgctgtcctgctccccgctccgtccttgtcaagcggcagaggaggcggcctgccgatgcaggccccctcctctgtttccttttgggcttatcgcacgcttccctccccgcccatgagggcggtcatctcctcgatgcgctcgagggggaacggcggcgcgccgagcggccgcatggcgatactcataagcttcatcgggttgtcgtccgccgccacgcggttggagctgagcgctccgcagcgcttgcagcggtggatgatcgcccactcgccgcctcttcgcacccagacggccacgggctccatgatgccgccgcagtcgctttcgcggtcgcccggctcaatgtccacgtgcaggctcgataagcagttcgggcagtggttgcgatggtcgctgccggcgttttccggcgtgcagagccgcccacagaccttgcaggtgaaggtgtcgcggcaggcgtgggtcttgtagtaccctttttcaaagattttgcgtttgttttcgcggttcatgttgtcctcctgaaaagcatggctctcgggaggaacggcgtgtgtcataaatttgccggccctcccggtcagcgcacacgctccagtgacatcgttttagacttcaaaaaacggctccttcattttaaaaattccggcagcccgggaaggcttgccgcagctatcgtaacgccggaacgacccgttgtcaagcgctccgcattttcccctcattccgccgtgcgcagcagcaggacggtgacgtcattgacgttcgtgcccgtcgcaccggttttgagaagtccgccgactgcgccgagcgcatggtaggcgtcgttatcattgagcgactgcacagcgtcaacacccttttggcgcatcagctgcgcggtctcgccgtcggcgatgccgcccgcggcatcggtcggtccgtccgtcccgtcggagccgacggagaagacgagcgcgttcgaaagtccctcaatgccgagcgctgcggagagcgcgatctcctgattgcgcccgccgaggccctttcccctcaggtggacgaccgtttcgccgcccatgaggaacgcaaggtttttcccgtcacgcgcatgcgtgcgcgcaatggaagcaagcatgctgcccgcctcgcgcgcctcgcagcagaggcaatcggtgaggatcatcggctcgtagccgagcgcttcgcacgccgcggcggccgccgcgcagagctcgcgcacgctgccggtgatctgtgtttcgacatttgtaagcgttttcggtgtttcctgcgccagaagcgcccacgcccgttccgacaggtgcaggccgtaccttttcgcaatatcgagcgcctgcgcacagcttgagctgtcgggatacgcggggcccgaggcgatcatgtcgagcgggtcgcccagaatatcgctcagcacgacagcgaagacctgcgccggcgcgcagtgccgggcgaagcgtccgcccttgacggcggaaagccgcttgcggatcgtgttgatctccacgatgtccgcgcccgcggcaaggagctgattcgtgacgtcctgcaattccgcaagcggaagcagcggcttttcaaaaagcgcgctgccgccgcccgagagcagaaagacgaccgtgtcgctctcggtcaaatcttccgtcagcgcgagcgcggcgtccgtgccgcgcagggagttttcgtccggcacgggatgcccgccctcaaagcacgcgacatccgcgatctcaccgttcacgtgaccgtacttcgtcacgaccacaccgccgcaaaaattatcctgcaaacacgcgcgtgcggcgtgcgccatctgccacgcggccttccccgccgcgacgaggtacacccttcctaaaaaggtcttccctttcagcgcgcgctcgaccgccgcgtccggcagcaccgccgcgatggcgcgcgtgatgatcttctccgcgtccgcgcgcaggttatccacaggtttcgacttttcctgcataagcgcccctccttttgaaaaaagctgccgaaaaacggcagctttttcgttatcttttgattttaccatgcccgtcttacggacacaagcggaattctcagaattccagcttctccatgcggtcgaacgcctgcttgagctggtcaatgccgacggtgcaggcgatgcggaagtggtttgcgccggtcttggcgaacgggctgcccgcgctgacgagcacgtgcgcgcgctcaagtaactccttgcagaactgcttgtcgtcgaggcccgtcttctccacgccggggaagaggtagaacgtgcccttcgggcgcacgaggctcagatacgggatcttttcgatgcggtcggcggagtagaaaatgcggtcgcggtacgcggtcacgtacttctcgcgaatttctttgcgcattgcgagcgcctggatgcccgcgcgctgggagatggacggcgcggagtagacgagcgagccgttgatgccgtgcatcacctcgagcagctccggctcagcgatgatgacgcccacgcgccagccggtcatgaggaagttcttcgaaaagctgttgagcgtgatggtgcgctcggccatgccgggcagcgtgcggatggggcggaaatcgccttcgtagatgtaggtcgtataaatctcgtctgccgcgatgagaagatcatattccttcgccacgcgggcaagcatctccatggtggacaaatcgtagcccatgccggtggggttcgtggggttattgaagataatagccttcgtgcgcggcgttatggcagcgcgcaggcgctcttcgctgatggcatagtcctcctcggcgtaggtcggcacatcgatgcacacgccgcccgccagctcgatctgcgcgcggtacagcgcgaaatacggggagaaaacaatgacctcgtcgcccgggtcaaggattgcaaacattgccagcgacatgccgaggcagctcgacgcgctcacgagcacgtggtcgcgcggaaggctctggtcgaagtcctcttcccacgccttgcagaccgcggaaatgagctcggggtcgcccttggggtcgccgtaatgggtgtagcccgctttggcgtcgcggaaggccgcgttgatgatggcctcgtcggtcgtaaagtccgtgtcgccgatgctcaggtcgacaatgtccttgtatttggccagcgccgcggtgtcgagcgtcaggccggtgcccgcgctctggaagcgcttggcaataaagtttcgcttcatgggtgactcctccttgcagatcgccgcggcagcccaatttttcaagcggcgcgtagaaatgctgaattttattgcagtatatggcagattccgacagaatgcaatcggtaatgtcgatagaattgcaggcccgcggccctttcatttcgttaacatgataaagtggcattaaatgataaaagcagcgccggtgctgctttcatcaaaaaagttacttaaagttttctcgcgcgtacttcatcagctcctcgcggaagtcggggtgcgcgatggcggccatcgcctcggcgcgctcgcgcagggtcttgccggaaaggctcgcgatgccgtactcggtcgcgacatactggatcatcgtgcgcggcgcggagatcgtgctgccgccggggatggtggcaaggatattgctcttgcgctcgccatccttcgtaaggcgcgaagagttgatgcagatgaagcccttgccgcccttggagcggtacgccccctcgaggaaatccatctggccgccgacgccggagagctggcgcgtgccggtgctctcggcattttcttgccccatgaggtcgagctgcacgccgccgttgatgctgatgacgctgctgagcttcgagatgcgctcgacggagtggatgtagtcgaggtctcccgggtggaaaagctgcggttcggcgtcgagccagtcgtagagttcctgagagcccatcgcgaggttccacgcggaaaggccggtgtcaagctccttgcgcgcattcgtcagcttgcccgcctggtagagctcaaggaacgcatcggaaatggtgccggtgtggcagccgaggtccttcttgtcggactcggcaagcatcttggcgaccgtgtagggcacgccgcccacgccgagtgacagcaccgcgccgtcggggatctcattcaccacgatcttggcgatggcgatatcagtctcgctgggcgcgcggtaggagcgcacgggcagcggctcatgctcgctctcgacgatgtagtccgcttcggacaggtgcacacggtgcgagccgtccacgccctggagcttgggatagtgctcgttgatctcgaagatcacggtgcgggcgctctcaaagatcgtgcgccaggcatagttcgaaatgccgaggccgcagtagccgttctcgtcgggcttggagacgggaacaaacgccacatcgcagcggatgtgcttgtcgcgatagaggtacggcagcgagcgcagcatgacgggcatgaatttcacaaggccgtttttctggagcttgcgctcataatcgccgatgtgccagctgtaatagctgaagctctcctgctcggggtctgcttcgacgacctcgatgcgcgggcggatcacaagaccgccgcggaccttgacgtccttcacttctcccttacgcgcagcgagcgcgcggtcgagcagttcgggaaaacccgcaccgaatccgtagtccacccagtcgccggactgcacagccttgacagcctgctccggcgtaacaaatttagcctgatagtcgttcataagaattctcccttggttcgaatcgcttttaatgtagcagaattttcgccgcttgtaaatcgttccgaagcggaaagcgacctcaaatcttgccgtttcgcggcgcggcgcatttttctgttgcgcctccggcgcgattctgctatgcttggttcagtataacattccgcgccaaaaggaggcaaaagcgccatggtcgaaaattatcaggaaatgctttcgagtgagcacagcggctttatccgtcacaacggcatccgcgtcgcttcggtcgacgaggaaaaaagcgtgctgaccgccgacgtcacgccggaaaattccaacatctggggcggcgtgcacggcggctttctctacgcgatggctgacaccgccgcgggcgcgttcgcgcgcatcaactacggccagcacaacgtcacgctgaacggctcgatcaactatctgcgctcgacggtgcagtccaaagcgctcaccgccgtcggtcgaccggtcagggtcggcggtcacatcggctttttcgaggtcaatatcaccgacgacaccggcgcgctgatcgcccgcgccgagatcaacatgtattttctgaaaaagtaagaaacgcgctaaaagggagcgcatcgggccttgccccgatgcgctccctttttcattcttgtgctgtagccgctcagtttttctggcttttgccattgatcagcgccgtcaccgcttcggcgacgggcttgcggtccgcgtcaaggaagaacaccttgaccttcgccgccttcgaccagtcggcgttcgcccacttgagcgtcacggtttcttcatcctccgcagcttcgctcgcggcataggccaggaatctgccgtcctcggcgtagagcgccgcagcgtagtaaaccgcgtccgtctgcttttggactgtgaccgcgttctcgcccatgctcacgatgccgctgtcagggtcgttcgccttcaccacgatggcataggttgagaagtgcttaagcgtcagcacggcgtttccgtcgcggtaggccacctcgaccggctcctttgtgccgtcatcggcaagataccaagcctgcagcgccccctgttgcgtccacgtaaacggaacggaaacggtcaccttgccgttaaagctgtgaatttccgttccgtttgccgtcaggctcacattcagcaccacacactgctcagtcgtgccgatgattgcggcctgatcgttgctcagtgcgtcaccggtgctgacatgcagctgaatgtcagcgccgttcgccgtcttgtccagcgtgatcgccgcgtccgccatcttgatcgacagcgtctccgcttccaagtcaaggacgtcgttcacggcgctgacgggcagcgtcaccttttccgcttccagcttagacacgtcgatctgcgccgtgctgtcggtttcgagctgttttttacaaccggctctgcctttgatacccgtgcagaggcatacgccgtagccgaagcaatccccgacggaaggacttcgcagtttcttttgaaaaaagcacgcgagcatggtgtttatatcaccggttcctttgttgaacgggatggagcggacctctataataccgcggtcttggcagggccggatggtctggtcggcaagttccgcaaactccacccgtgcgaagacgaggtctactgggccgagccgggaaaccttggaatccctgtcttccatactcctatcggccggatcgcgctgctgatttgtctggatgcctattatccggagtgcttccgcatctgtgcacttcagggcgcagatattatctgcacgatgttcaacgcataccacgtcaaggaaagccgtcggcttccggacccttacgcaacgatggcaggtgttttatgtatggcaaatgcgctgtccaaccatgtttttgtcgcttgctgcgatgcggtaggtgaatgcaacggcacgcgcttcgctgggcaaagcatggtcgccaaccagtggggtgcaccgcttgccggtccagcaagcgatgaagaggaagctatcgtatatgctgacattgacctggctgacagccgcaggaagtacttccacccgacaaacagccgtctggccaaccgcaggatcgatgtgtacagtcaggacctcggctatcatccggaaaaatatcattaagcctcatctctattattttcacaggcgcggaagcgccggggaggggatggccatcggtcatcccctcccttttatcgattctgacgcgctatgcttccagtacccctggcgcggcggaaacttggccgccgtaccagcaccttcgcctgcctctgtcctcctgcataatgtagatagtggatatttttgccaaaaccgtgaaatgagagagtgtcgccgcaatgcgccccatatcgtgctgcggcatgtgaggagagatggctatgagtacgcttgcgcttcggaatgtaacctactatcagacgtaataccagaaggtggacgccctgaaggacatcagccaccgttttgacatgggactgctccgcgcgtggtgggccgttccgacagcagcaagaccgcactgctcctgctggatcagtgctttaccgagaccgtgagcgcgctcaggcgctacattacgttcagccgcattctcttccctgccttgttcctgatggtaggtctgatgggctttctcatctcgcggctcatggtcaagcggatggaatttaccgtcatgtggggcctgtgcgcctcgcagaagcagaggggcgcctcgttcttcttagagcaggcgctactgtgcctcactggctgtctcatcggccgcgccctgtcggtgcaggctgtgggccgcacaaacctgatggctttgctctccgagagggaataacaaaaaatagagagttttgtcctgtgacagaactctctatttttgcttttcagcctgtaagcgtgctccgcagccctgtaaagagcagatcattccgcctttacgagcttctgcgcggcccgcagggaaagcggcgcagcgcgcactctgcactcgaacgtccgggtcggatgtccatattcagcgccgccgtcacgcagatcatgatctacgttcttttttctatcaagaaaataagggttttgagggtggaacgcagaacgtggaacgggaggtgggacgacctgcgaagtgcgtaggctcttttgaggatggatttggagaaattacctcccccctcaaaaaaatatttcaataaaattttttgtgcatgttaaccaaaggcgctaacagcgcggaatttcattggaaaaagcattctcattgtcacagaatcccgctacttggagcagaagtaaagctatatgacgcgtcttacaatcgcttgcagtgattgagatgaagacatcaagcaaatcagggaagattttatccagatcctcaagaaccgcataaccgtatgctttgttgatacgaaccatattgtcggtgggaatagatgctgtttcagaaaatgcctccgttgcttctttggttgcatcagtatgtgacaaaatcctgaagcttggagcatttttgaaaactctaaccgccttttgctgaactcttcgcgctccctcagacagccgaaaaaactgcataagcaaagcgacatccgtctcacgtggatagtctaatgacacgaggtgatccacaacgtaaaatgctcgatctcgggactgacaatcaaaaatagttctactctggttgtgttgggctctaagccgagcacaacctccggtgaacaccgaaagaaagcacacaacagcaagagacggttacggctgattttcttacggacacctttttcaacttgagaaatagcttgaaagtccacaccaatgtagtcagcaactcgctgtaaggaacagcccctttcagtgcgcagttctctgagctttttgccatactgctcgataatattcttgtcgtcgaacgtagatggtggaatcttcttgaaataatctgaatcctctgtgagccccatttcaggaaatagttctatcatcaactttggatctccggcgtgggcatagtcaaaaaattcatttcgccgttttcgaagcagcggacgaagatctccctccgctctccgcttgcggcgagcatctttttctccatcggaaaccctcattcaataaaattttgtcgctgcctctgtcaataggaaagtcccccagcacgtggcataatcctcccatcaaaattccgaggaggagaatgaaatggctattttttatgtcgaaggtaatgatgcccagaccatcgcagcagcagcaagcatcgaaaacgcagcagagcaacgcgcacgcgcagaggcagacaaaacaggcggcaagcctaccatgacctttttcgcgtcagcacaagaggcagcggtcgtgatagccgctgacgacctgcgtgcacaatataaggaagagttcgggcttgccaagcgccccattctccttccctatggtagcccgctgatgccgtatcaaggacagcacaatcagggaagcagagacggaaccttccaccgctacgagcgtcgcttcgctggcggcggagtgtcgcatgtcgaactcgccaaaattttgcttacccgcgtgtggctcaagcgctgcggtgaggctctctacatgcggaagcacccctgtttccgccgtctgaccgacaatcagctctcgtctctgatacatccgcagtgttacggccttgtcgctatggccgagcgcttcggatacgttggccacatccgcgccgttggtaatcgcaacgcttgcaaaggtgtgacgcagcttgtgcgggcgaagatcaggcagcccgcaatggtcggacaattttttgagatagcgcgtggggctttgcgggtgcattggctccggactatcctcctttgtaaaagcattggcacgactataaccgtcgagcgcgaacgcgagcttttcggaaaagaactgaataccgaacgcaaataatccgctatactaagatgaaaagccgcccttttgagcagcttttttctgtcggtacgggtttttgtatgggttttctaaagagttcaaaaaccgaacacaatccttttctctttaaaaatcgcaaatataaagcaaaagccgctcaaatcaaacgatttaagtggttaatgttggagctgctgggcagattcgaactgccgacctcatccttaccaagcgtcgtagagccttccagcccttgcagtataaggctttccagcggttttttgtccaaaaaggatgaggtcgcagcctgtttgttccattgcttccgttcgctcattttcccgtgtgggtcacggtgtgggtcaaagcttcttcatctcatcaagaaacgaaggcaaaacatcaaatatgatcgcacagatgactgtccagttcgtatcctcataataatgcacaaattgaagtcttcgccagcacgcttctcgttccaaaaatgcagtccttcgtttaagtagatatccgcagcagatcagtagaccattccagatgctttttcaacacctcagatgccttatccgcatcgcgcaggcgcagcgccttcagtatctccagatgctgccgcgcactctcacgcacatcgttgagcgcatcaatggacatagactggtagcggcgcaggtttgaatcgtagctggcaacaatgctcttaatgtacttgttggagcaccgctccacaaacaaaatatgaagactccagtccaactcggaaaattccccctgccccgggtgttcgccgcgctcacaggcatcaagcaatgcctgaaaatgtctctcaaaagcatcaatctcgtcgttggtaatacgatagatcgacgttttgattgcctgcacttccagcaagcagcgcacctcgtacaggtcctccatatcctttgaggagaggggcttaacataggcgccgatcccgtttttgacctcaacgaaattctctgtcgccaacatacgcagcgcctcacgcacaggtgtccggctcatgccaagctgggacgccagctgactctcgctcagaatgtctccgggcatgacctttcccttgcagatcgcatccttgatctcatcgtatgctttttccgacagattgaccttatgctttgcttccaacatgatattactttccatttcacagttttctcgggagaacgcgggcaaaaggctccggtatgcggtagatccccgcataccggagcatcggccctccgccgcagtttttgttcattatacacaaccgctgcgcagattgcaatgtaaaaaattccgcggagccgcgctgtgtcgatcaggcgaatgcaaacagcgtgaacgcgggccaataggtcacgagcatcagcacgaccagcagcgcgaacaggaaccagatcatgtacttcatcatctttccgatggaaacgccggagatggcggaagccacaaacaagtcgatgccatagggcggcgtgcagaagccgatggcgaggttcatcgtcagcatgatgccaaaggtgaccggactcatgcccagcgccgtcacgacgggcagcaggataggcgcgagaatgatggtcgctggaatgttatccaccaagcagccgacaatgagcaggaacaggttgatgagtacgaagagcaggatcttgttgtcggtaatgccgagcatggcagccgccagcgtacggggaatgcccgtcagactgaggtaagccgcgaacgcagaggacaggccgaccatgaatgtggtcgcgccgttgacaatgacggtatcacgcagcgccttataggccgccttcgcgtccaactccttatacacaaagcggccgacgatgtaggaatacaccacgctgatgacggcagcctccgtaggagtgaaccagccgctgtagatgccgccaagaatgatgaccggagagagcagcgcccagatcgcatcaacaaagctgacccagatggccttaaagctgaacttctttctctcgcccttgaagccgtacttcttgctaagaatgtagcaggcgatcatcagcgcaacgcccatggcaatgccggggaccacgcccgctttgaaaagatcggtgatcgacgtgccagtggcaacgccgtaaataacaaagggaacgctggggggaatgataacgccgatcgtgccggcggcggcgcagatggccgcactgtagccctcgtgatagcccttatccttcatcgcggggatcatgaacgagccgaccgcagaggtggtggcgatggccgagccggagattgccgcaaagaacatacaggtgatcgtggtgaccatgctcaggccgcccgtgataaagcccataaaggtatcaaagaaattcagaatacgcttggcgatgccgccgccgctcatcagattacctgcgagcataaagaacgggaccgccatcagggggaacgagtcgcagccggtgatggccttctgcgagatcatcagcagcggaatgctgccgtcgccgcagacaagaatggcgatcagggtggcgataccgatggcgtagccgatcggcaccatcatgatcagcagaataaagaagctggcaaacaatacgatcgattccatttactctacctccttgccggccgctttcttaatatcctccacgacctgaccgatcaggcgcaggctgaggataaaggacgagatgggcagaacgctgtagacgatccacatcggcaggcgcatcgcgccggacacattgccgcgggtatacatctgattgaccagctcgctgccgttggtaacaagaaatacattgaaggcgatcaggatcagcgtggcaaagatgtccacgaccgagatgaccttctcatttttgaccagagacttcagcagctccaccttgatgtgctgcttgtcccgctgcgcgatgctgacacccagccagatctgccagataaagatgtagcgcgtcagctcctcgctccatgccagggagtcattgaaggccttacgcatgatgacctgtgcgaacacgatcagcgtcgtacagacgaggcttccgcagaggaggtattcctccagcttgtcgtagccgtagatcagctttccgaaaaagccggtctttttcatagatgagctcaactcctctcgagaaaatacggtgggcgggccgtcgccgcgcacgggaacggcccgccatatccgttagggaacaaaaccgattgcgtagaattacttgttgaaggaagtggcaagatcaaagatctcagtgccccatgccgccttgtactcgtcgtacatgggctggaccttatcgacgaaggactgatactgctcgtcggtgaggtagttgacctccatgccggcctcctgcagcttggcgacgatatccgtgttgtcctcaagctcgatgttgcgctggttggcgaccatgttggcgcagcactccttgagaatggcctgatcgtcggcgctgaggctgttgacccagttctcgttggtcagaatgggcaggaagttatggacgtggttatcgatggtcagatacttctggacctgctggaagccggaggcgtagatcagcgtggggggattctcctggccgtcgaccgtgtgctgctgcaggccggtgaacagctcagagaagctcatcggagtggcgttcgcgccgaggacctcgtacatgcggataaagacgggggagttcatcacgcggatcttcaggccggcgagatcatcgggagtgtagatgggacggacggagttggtggtgcagcgggggccgttgtaaacatagccgaggctgatgaagccgttgccggcgatccactcgtcgatctgctcgccgagcttgccgtcaagtgcgtcaaacgcactctgcgcgtcggtgaacaggtagggcatatccagaacgccgatgcgctcattgtaagccgtcagaacggaagtggagggcagagccatctgaatggtacccattgcgacagattcgcacagctcttcgtcgccgcccagctcagcattggggaagatctggacttcaatgcgcccatcggtcttggactcgatctcgtccttgaagatcagcagagccttatgggtggaacggtcctcggcctcaacgtggccgatcttgagaacgatcttctcagcgggggtatccgtctgggtatcgccattgccgctgggggcgtcagtcttgctgccgcaggcagtcagggccaggatcatggcgagtgcaaggatcagagataacgcctttttcatttcaattcctcctgttttcatcgcttcttgctgtttatttcttccgggatacgcccggtggggcacacttttcgtcttcccctcacacgatctcgacaaagccctcgtcggcattgacgagcagcgtgtcgccgtcctttacggtctcgtaaaactcctccggcaggcggtcgaccatggggatctccataatgatcgcaccggcgaccagcacgggatcggggtcctgcacgatcagagcagcgggcatgttgtggaagcggtcgagatggtacaggccgtcctgctgaacgacggagctgcccttgccgcctgggaagagcaggaccttcttggcaataatgcggccctcaaggtagtggttcttttcctccatcatgccgtcctcgggacggacctgatagaacatgatgcgatccttggagatgatggcttcagcctgcgcctcgccctccgaaatcttatgacatgcaaatttctttcccatattacttcacctctccggtcagagcggcctcgatgcaggtatcgaggtcacggatgacaaagttgatcccgcggcggcggggatagtacgcacacttgggggactcggtgatgccgaccttgcctttgagatagtgccagcagggttggtcggggcaggagtcggagatcagctccgcgcccgcggcggtcagaatgtcgttcacgcccatgcgctccgccatctgcagcgcgtggctggagacgaggatatacatggggatagcgagcttcttgccttcaatatgttcggcgatgtacttggcctcctccagcgtaaagtgcgggcagccgaacatggcaaagtccaccttgccgtcacgcgtctcgtcgcagaacttctcctcgaagtccttgaggtcctgatcggtgataacgacctcgcgctccggcttcttgccgccgaaagcagcctccagcgtgggcgcctcgggcgtaaagccgacgatgtggtacatgccgtaggcgccggaggtattgagctgtgcgccgaggttgcgcagtgcttccggggtgatgactttcggcaggcccgtgaacacggggatgccctcgccgatcttgtcgcccatcatgccgagcagatggtactcataggcgctcttcatgttggcctcgacgcgaacgaggacgttgcccttgcggttctcatcgagcagcaggccgtattcgggaacgcagcccgtgatggccgcgcacagcgcgctgttggcgctctcgcggttggagcgcgcaccccatacggcgttgacatacggcgtggcactggattcagagaatgcacagacctcgccgaagttcggcacattggtagcgatgtagggggtgcagttgtagctgagcaccgcgccgagcgcacggtaggcattgtccgtgcggatcatgtgagcaatgtcctccgcatccgcggggtgggcacaggcgccggtaaagtggccggtgcagaagcccgggttgagcgtaggcgccacgcggcagcgcgcgccggccttgaccagcttctcggcaaaccagaggtcgccgtcctgattgctcagggccacatgcgcccgcttgatcggcaccatgcgctgtgcgtcaaagcactcgccgatgccgacctggatcttcatggcataggctgcgccctcgccatatttgccctccagcatggctttctgttcatcgttgagaatcatgtatttccctcctgttttttattggacggtcatttctgaataagagacatgcgcgggtccttcgccacctcgccgagcagcgcctcggaaacctcgatttccccaaggtggagcgtgtttttgatgcggatgatcttcggatcgtctcggtcgatattgcggcagcatttgagcgccacgcggaccgccgtttccgcatcgtccaccgtgcaggggaccgatgcgtcgatcaggcagttgcaggcgatcgcgttggcgtacatcgcctccaggtccagctggtcggcgaccttccttgtgataacatcgaacaagcccacaccgatgccgttaccgtggcttgccggcgttacgtccagcagcacgaggcgctgatacttcgggatatgcagtacgaacttcttcagcacggagcttcggccgagaatgttaggatcaaagccagcgccggaaatgtccttgccgatctcgtcacaaacgatgacgtccgcttcgtcgagcatgatatagggcatattgccccgtgcgatctgcacaagctccttttcccgctcgatcagcccctcggcagggaccgcttcgacggcataggtcttgtcgtaagcattttccagaattgcgatgccgaagccgatcggcgcttttttcaaaatcagccgtgccgtttcctcgatcacgtcggcaaatacctccggcgcttcctcatgcacggccgagcagcccttgtggttgccaaggccgataacgagcatcttgcaaaggccgctctgaatggggccgacaaagtcggtatgcagcttcacgcgattgatgggtacgatcaggtccgcctcatacgcggcacgatcaaaccacacgggacggccgttcgcgcagtcgccgagatgcacggtgtccaccgtcgtcacgaccggaacgcccagacgctcctcggtcacaccatatccggcaagcacctcacgctgtccctcctccgtaccgccgccgtgactacccatagcggagacgataaagggctttgccccaagctccttcaggcccttcaccgtcgtttccacaatgcaggacagattctggatgccgcggcttccgacgccgactgccacacgcatacccggcttgaccagcgcacagatctccgactttgccagctcgcggcgcacggtgccctctatatcggtcaggcaggtctcatcgaactgttgacgcacacggtacatcttcggcagcggacgacgcaggtcctcttccagcaggatcggcacatttatcactccccttgctttaatcgttcagcttgtttttcgccgtcgaatcgtactccagctgtagtcacgttgtatacaggtttatttgaactaattatcctatctggtttttcgcttgtcaacatgtttttactttaccacgttacttttgtaaaatataacgttttcttgttttatattttgtcaaaaacgccgttcaaaagggctggcaggcaataatttggtcgtgacatccccatccgtgtaagctcaatgtcacttagataatgcccaaaaggtgcaggtgcaaccaaatatggcatgtcaagagatgtccacgcctgtatcttaccatgcattttcccactctcgacaatcccccgcgttcactttatattggtaacaggcgaaagccaaatctcgcggctttccggtgaggtccacaccgtaagtgtgacctcagccattcatggaccccgtagggcattatgaccaccctgtacgcaggaagttccatgaaggtcgacagtttttggcgctgtaccggcagcgcgggtgtgtacccttccgtcgaaagcggaaaggacacagcgagacgaaaaagtattttcgtctcgctgtgtaagttttcagaacctttcgttctgaaaacagctgatttcataggtgcaggacacccctgatgggtttcctgcacacattcttcctttccgtcatcggacaagcaggacgcaaggcacctgagtaaaagtgagtttgaaacggtgctgtccggtttggagtgcgtcaagcgtcccgtggaggatgcggtgctcaggaacctccggcttgaaaatctgcggggagccattgcggaattggacgtgcaaggtcaaaacctgctctccctccgatacagcggtgagctgacgatggaggagatcggtcagatctatggcatctccagaatggcggtatcaaagcggctgcaaaagctacacgaaaagctgggaagctctgtctcatgacagggcttcccagtttttttgaaaaattttctattttccggtttacaaatgcgctctgagtgtccttataagtagaggcaaatctgttccactatcggagtatggctgagttggccgcagccttaccgcctcacctgaacacaaaaggagcgttcatgactatgaatccatttgaacaaagcaagcagcaactgctgcacccccttacctctcaagtcgagcgggaggtcattgactacatccgccaggagatgcagcatgacgcaccggacagcattccaaccgaagaagaactgttcgccttcttccaatcgccggacaaaccgactaaattggacgcctaccaacaaatgctggcgaccgacaagctgctggagtacgcggagatcagtctgcgcaccctctgcgacctgatccgctatcagcagctcaaggaattgggcgttgtccattctgcaaaggagttcattcaactcttccaccccgaagaacaggaggacacaccatgaatcaatttcccaacaaaaactatttcacaatgccgaacgagatcttctcgcttgggctggacgcaagtgagattgcggtctacgcttacctccgctgccttgaaaaccgcagcacctaccagtgctggcccagctacgccacgatcggaaaagctattggccgtacaaaaaatacggtcatgcagtatgtcaacgcgctctcggagaaaggactcatctataccgagccgacctctgtcctgatgcgttccggcatcaagaagaacggcaacctgcgctataccatcaggccgatccgtgaagccatagaaatctttcacgcgcgccaactgtctgcggttgaacgtgcgacagagcggcggcaaattcagcgcaagctgtccacggtgaatttgttgcccagcgcatgaggaaagactaactattaaatgtcaagtctgaaatgtgaggagtggtaaaaattttagacggatcaaaaagggcatagcaaagcagacatccagatggacgcctaactgagcatatagaagaatggatttacgcagcgttacgatatganaggaaagactaactattaaatgtcaagtctgaaatgtgaggagtggtaaaaattttagacggatcaaaaagggcatagcaaagcagacatccagatggacgcctaactgagcatatagaagaatggatttacgcagcgttacgatatgactgcttggatttctccatcgcgtaaattagacgcaccaatttctttgccgcatgagaaattgcaacattgtagtgctttccctcgccccgcttcttagcgaggtaagcagcaaaggccgggttccaaaggcaaacatatttggtggcgttgtaaagtgcgtagcgcagataccgggagcctcgcttttccatgtgcgaataggctccagacagagaaagatgcccggactggtaagtagagggcgacatgccagcataggcaagtatcttatccggcgagtcgaagcgggagaagtctcctatttcggcaagaatcatagcgcccatgcgaacaccaatgcccggaatcgttgtaatgggggactgtatttcatccatcatggactggatcgcggtctcaatgtcttcaatttcggcatccagttcgcggatcaggcggatcgtatgctgcaattccagagacttggctggcatgacagagccgacagaacatctggcagcgtctcgaagcgttgttgccatatctcgcccgtagcggcctttggaggcgccgtataagactgccttcaaatgcgtcaggtgcgcttcggcaacctgtttggcgccgggaaactcactgagaagtgcgtaaacggatgccatgtgcagtgttggaaccagcttttccagttctgggaacagaatcgtgaccaggcggaaaacagactgcttcagcttcgcccgttcacgaactttatcaaaacggtatcttgtgagtgactttagttcctcgttgtggtatgctgtgtctgtgtaggacttgaggtccacatcagacatgagcatagctgcaatggttcgcgcatcgacacggtcggtcttggttttccgaagactcagactttttcggtagaggttggtgtgcagcggattgatgacgtaggtgggtaggcctttgtcaagcagaaatccgaggatgttgtagctgtagtgtccggtagcctcaagccctacttttattttatcttctggacgggtgcagcggcgaatggtttgcaggagcctgtcaaagccctccgcattgttttggatggtgaatacatctgtcagagcttcaccttccgagctgaggatgaagcagtcgtgcttgtccttggcaacgtcaatacccacgcaaatcatgatgaatacctccggtgtgtttgtttgatgctgggtccacaggacgctttactcttgtaaccttgttctacataaaccgtctggcggtatctaactgattaacaatactgtaaagggttgtggttggagcctttcctgaaccgtcttgcggtaggaggaagtaaccaatccacagcatctcttacagtgtagcacagcccttggagaggggctttaataactacgactctataatacaaggaagaacaaaatgaagcattccacctacacngggttgtggttggagcctttcctgaaccgtcttgcggtaggaggaagtaaccaatccacagcatctcttacagtgtagcacagcccttggagaggggctttaataactacgactctataatacaaggaagaacaaaatgaagcattccacctacacaagctatgacgagctgccgctgatgctctccgtcgcagaagtcgctgccgtgcttgggatctcccgtgccggtgcctatgagctggcgcatggcaacggattccccgcgctcaaaatcggcagccggatcgttgttccgaaagacaagttcctcgcatggatcgacgcaaacagcggttccaaaaaacgcgccgctgaaaacctgctaaaaagtcaagccctaattaaaagaaaagttatcggcaggaaaagagtatagcaaaacagaggcggcaaaacggaacgcttggccgcctcaaataaagtattggagatctcagctcattctattgccgnaaacctgctaaaaagtcaagccctaattaaaagaaaagttatcggcaggaaaagagtatagcaaaacagaggcggcaaaacggaacgcttggccgcctcaaataaagtattggagatctcagctcattctattgccgacaaactgcggtagagctctgtgaccttgccataatagactcggaggaacttattcaggcctgctaccatagcgagtttaccactctttccctcgccgcgttttttctcaatgaatgtaaagatcgggtcgtttgccggnctgcggtagagctctgtgaccttgccataatagactcggaggaacttattcaggcctgctaccatagcgagtttaccactctttccctcgccgcgttttttctcaatgaatgtaaagatcgggtcgtttgccggtttgtgcatcacatagctctgcatgacttcgtacccagtcttacgcagatagcgatttccccgcttggagatatgccggttattcgcgtagaatttgccggactggtacggcggcgcatcgatgccggcgtatgcgatgagagcccgcttgctgtgaaagcgtcggacatctccgatctccgcaatcaggcgcggagccagcgtgtccccgatgcagggcatttcgcgcacgagagaatattccggcagagtcttggcgagagcttgcatctgtgttaaaatagcgtcacgggacgcctccactgtgtggag

SEQ ID NO: 21 - DNA, 236054 bp, Colonithrix sana
  source 1..236054: mol_type = genomic DNA
gaggcactgagaaactctggaaaaacaagaatgcaaagcaagccctctatacactggattgaaaatactataccgaaaaatcttatgtagaatctgcttatttacaggagtctgaaatttttcggtatagaaatttactcggtataatcgccacagatgatgaggtaatcgtctttggtcaggcccccttgctcgcggaatgccgcagggcgtagcctaccaaaatcaccgtgggtgtcaccggtcataaaaattgccatcttttttcgcctttcctttttattgtaatccttgctcgagcaccacatcggagtctctaaattggatgcggatcgtgtcggcgtcctcgaccgtgatcttctgaatgatctgccggatgaactcatcgtcgaactccgtgtagccctcgctgcattcgatcaagctgtcccacatttgctggcgcttggcaacttgttcttccagaccgacttcttcctgctgggcctctaaaatttgttccttgagagacgctttctcatccgtcagggctttcattctggcgttcagatcagcgtcggccatgttggccagcagcgagtccagcagatcagcctgctcatggctgacttcgtcgaggcggcgcttcagcgtcagcagttttgtaccggcctgagtcagcgcctgcttggcttcctccaccatcgccagcacatcggggcaaacctcctgccggatggccgcatactcgttcatggcatcgaggatggcgtggtggagcttgccctcatccaacgtaggtgagacatggcagtattttgtgccaaactccaaccgcgaaacgcaccgccagacgatacgctttttcccatctctggcccaggtcacccgcttgtatggggagccacactcaccgcaaaccagcagctccgtcagggcatatttgccggagtattttccaagctccgtttttccgcttttctgcagcacctttcgcttgctggagcgacgtgtcatttctttccgtaccaggtcgaacgtctctcttgagacgatggcggggtggttgttctcaacgtaatacatgacacgctcaccgcggttttttcgaactttttgagagatgcagtcagtgacataggttttcagcagcagggcatccccgatgtatttttcattagtcagaatgttatggatgatggcaggggaccagcactccacgccctgggccgtgggaatgccgtcctcgtccagctctcgcttgatcttgcctaacgtgcagccgtccagatacctgcgatagatgcggcggacgattgcggcttcctccggcatgatctccggctggccgtcctcgcccttgcggtagcccagcattttcttatattgaaagtggacattgcctgcctttgcgcttttctctttgccccatgcaacatttttgctgagtgactcagactctgcctgggcaaagccgctgaacagggtgaccagaaactcgctggattctgtaagagtattgatattctccttttcaaagtacacgccgatgccattggctttcagaagtcggaccgtatccagacaatccaccgtgtttcgggcaaagcgggagagggacttcgtgatgatgaagtcgatgcggccacgcttgcaggcggtgatcatcttattgaactcggccctctttttgaggcttgtgccggagatgccctcgtcggcgtaaataccggccatctcccaatcagggttgtcctgaatcttctgggtgtagtaggtcttttgggcttcatagctattgagctgttcctcactgtcggtggatacgcggcagtaggccgccacacgcatcttgccaacgtagtttctaagtaattcttccggcttcctggtcggtgggatctcccgcacacgccgttctaaagtggttgttgctgctgcttccatggttatttgtcctttccagtgaagttatcatccgtaaatgtgaggctcaccgtagcgtccgacgcgacggtgatataagagaccacccggcgaaagcggtgccaatccacgtccactgggcggtctgagggttcatattcagaagtgggctgggggcagcagtcatatcgcgcggctgcaccctgtaaaataaggctcattacggcttcgggcgagtcagggcgttcaagtccgcggttgatggcgttgttcagtcggatgacctccgcagagggagcataagcatccggcccttggcatttgtgcgcctgaagctggcgagcaacctcttggatcgtagcatcggcgtccagagtggtggcaatatcacagcattcgcatttgaggtacagcttgctgctgtcctgccagcgaccacccagacgaaccatctttccgttgcaggtgcatcggaagtagggcttcagacgatcaaggggtgttactttcccttgtgcctgatatttgacgcccttttcggagattttctcctgtaccgcctgaaaatcagactcgtcgatcatcactggataaccgtctttgccgatgtagcgggtgttttcgaggacccgctttaccttgtgcttgttccagagcggtgcttcgggggagaatgggatattctgccgattcagtgcatctgaaatgttctggtaggaggcaccggcgttgtagagggtatacaccataagaacgacctgctgttcctcggggacgattgccagggcaccatcatggatctggtatccatataagattttgcgattcgtcatcttgccgttacctccaagtgctctgttagctccagcccgccgtagaggtggaagcggagcatggtttgggactccgcaacgatcttctcgacaaggctttcaaagagatcatcgtcaaaggtatccagttgatccgggccatcgaggacagcctgctggacctttagaagttcgtccatgacttcgtccaacttttcgttttccgccagcctgcggcgctgcccgcggagctgtgccagcctggcgctgattacattcatacgggccgtgcaggcgtcggcgtcgagcagaccattgacacgcagggtactgatcttatggctttcttccgtcgcttccgcaatggcgcggttgatcgtcagaatcttcggattattttgccgcaggatggagtcaagggtgttcagctgctccatggcaggtttcaggatgatgtctgcattgtttttgagtttccggtacattcgaaggaacgctgcggagatctcggattccggaatgcggcccaccgggcaggacgcggcgctgcggtcgtgctttcggcaggcccagcaggtgtagccggttttcgtgcacctgcgatgaaagggtgttccgcagtatccgcaaaagattttcatggagaatggactcttgtttttcctctttttaacccgctctgctttacgctgtaggagagcctgcaccttttgaaaggcttccttgtcaatgatggcgggatgggtgttttcgacgtagtattgcatttgctctccgcagtttttcttccgaacaaacgggaagccgcaggtgtatgacttctggcagagagagtctccaatgtatttctcattggtcaggatgtagcgaatgccaacctcggtccagagtccaggctcccgatgtggcgagatgcctttagcaatcagcacctccgcgatccatctcatgctgcggcccttgaggtaggaactaaagatccatcgcaccacggcagcttcctctgggatcatctcaagatttttcttgtctaccatgcggtagccgtagggagcggtacaggcgatgaataagccttgctccatgcggtgctgataactcagacgctggtttgctgagatggatagggactcctgctgggccagagagccggaaacgctcaccatcagttctgtggtgagcgttcctgtgtcgatattttctttttcaaatcggacggtgacgcccataccggagagttctcgcagggaggcgagacattctttggtgttgcgggcgaaacgggctactgacttcaccagaatgcggtcgatcttgccctttcggcaatccagcatcatccggttaaagtcatcacgcttgtccatgcgcgtgccggtgaggccctcgtcggcgtacacatccaccagctcccagccgtcatgctgagcgatcacctcggtgtagttgcggatctgggccgcataggaatgcagttgatcctcagagtctgagctgacacggcagtaggctgcgacacgcaggtgttccggtttgagtgcgtggggcgcgatctcttttaccgtagccatcagcaatcttccttatggagcgcagcggcttcggccatgcggttgacgcagttgtaaagattttcgataaaaatgttcagggcgtgtaggctgtcaaagccattgataaagatggtgcagtcgtcctgcacatatttatcgccatcctgataccccagcttttccgctgttgctgcctcatggatgcagacccaaacggaaccgtcgctgcggtaagtttgccttaaataataattgtattccattgcgttttctcctattgacttttgtggtagcacacacactaccacaccatttgtggaatagccagcactattcccaaacagtctgtgggcggtatttctccctggcaagttttttggcataggccagttccgttgctgtcagaaggcccttttcggataagtgttccagcatccgaacggccagccgatactgcaattccttcttggcatcgatcatgcgtccacctcgaaatagctttccggctttagctcccgcaggaacttcgttacagcccgcaggctgctcgtggtgcgcatgtccggcagagcatcccgcatggctgcgtagtagcggcggccatggcttgcgcgctcgtccaagatggcaatgacgcaggtgtcggtctctgtgcggatggcccgtccaaagccctgacgcagcttgatctgcatctcaggcacggccacattctgaataaactggcgaagggatgcgtattcctcccgctctttttccttcagtgcgtccggataggcgaaaggcaggcgggggatcaccagcagggatacgcagtcgccggggaaatcaaagccttcccatgcagcgcctgtagccaacagcacagcccccggcgtttgccgaaaccgctccgtcatgtgcatggcgtttctgcccaaggtaaataacgggaagctgagttcctgctcccgcagcctatcctttaccgccgacatggcggcgtaggaggtgaacagcaccagcgcatggccccaggccgcgcggatgagttccgcgatttcatctgccaattcatcatagtacgtttccgagctttgactcggtggaagctgcggcaagtacagcagacaattccgcttatagtcaaagggagaaggagaaactgactccgttacgcgccgcccgtccatcagtccagtctgcgaacgaaaacggtgaaagtcatcccctacagccaaagtcccagaggccagcacaaaagcgtgttccgacctccacaggacctggcgcatctgttctgtcaaatctgaaacggtggcgcacagcatggttccgccatcgccgtcatccgctgtgtagaggatcatattcgttctcggactgcttaagagagacaccgtgccgcgcagcttttccagctgcctgcgcccctgcgccgacagcagcctgccgacctgcttctcaataacaagaagagaacggctggggatcgtcagtaagcgaaggtacgcaaccaggggttcggtttcctctctgggctgcgtgagtttgcggagcagcggccccatcgtgcctgccagcacgtctgctgccagcagataccgttccgcgcggagctggtggatcatgctctggatgtcaccggctgtcagcgtcatgccaaacatctcccgcgccgcctccggcagcttgtgtgcctcatctacgatgatgacgctatgctccgggaaaatggggcgtctgccctgactgcggtggatggcgtctgccaccagcaggttatgattgcagatttgaaacaaaaattgatttttgtcgcaggtcttgaggaaccgctgatagcggcagtccttctgcttgcagtcgcagacctgcggtacgcagacacgctcccggtcatagccgctgagatgagaaactctgtccatgtccagcgtttccctaagagtccggagcgccgtcagcgcttccggatttttctttgcaggatatacctgacgcagccgcctgtccaatcgctcatcgcagacataatggcttttgcctttgcggatgaccgctttcagtggcttggtaagaatcccgtccgccagtaaaacgcaggacagcagcggcagatactccgtcagcaccgcgttttgcagcgcgatactggatgtggaaatgatgatggggcgggcgatctgccctgtcgggaaagccgacgctgccgtggcagccgccaggtaggcgtaggtcttgccgatgcccgtcccggcatcgcacagggcgatcctcccgtcctgcatggcgtccagcatccggtgactcaattggatctgctccggacgctgcgccataccgtgggcgggaagaaggtcctgaaaaatatggttgatcagtttatgggctttcagcctgttgtcattggtattcatccgataatttcctcttttcctgtcatgctttgttttcgtttccaccgtatttgcagcgcgcgccccggtgggaaaggggaacaatacggacaaggtccggcaagaccttcacgggcgtatttccgggatctctactgctttcaatcccggagcagcccagcctcttcatgctggccagtgcattgtgtctcattatctgcccagacagcgtctctgcgggcggcgctgccaacgccgcccctgcgcaggtaaaatcgctcgccgcgggaagctgcaaggcttcccacgggtcgtggcgcacactgcgcggatcgctcttctgtccgggtggttatccgtattgctggtatgcaattttcaaggaacagcgaggggcattcggagcccctcactgtcctcccgaaaattgcgttcggtgaatacccttatttcgaggaattttcaaaaaactttttgagatcccgcaggatgcggtctctccgcttgatgaccgcccgctggctgacgcccattctttgggcgtattcccgtgtagacgcgccgtcgaagaacagggcgttgatgagttcccggtcggtatcctttagtgacagcagcgccagcaaaaggatctgcttctgttctgccagattccgaagttcctcacgctccagtgcctccgtttcggcgctgggggccgtttctgctccgacatagtccggcaaaagcgcatcttcctccatctgctccagagagagcagttttccggaggactgttcctccgtgatatagcgctccctgcggtttgcctgcgcataggcgaggtaaacattctccggcacctctacgtccatgccgtctacagtgatgatattggcgatgacttcgccaccttcgcttcgaacgcgccgatagttgcgttcttcctgccattttttcatgattcatgactccaatctcagatttttttgaaatgtctgagattgggtcacggatatttagcgatatagggctgccagcgtctgcgcattgtgtgcctttccgcttttcagccgaagaaaggcgcaaaaaaagagccttacgcatagctgaaaagctacttgtaaggctcctaactcaatgttcccgattgcgtctctcgcccttcccaaatcgcagcccaacgaagtgggtgcgatttggagaggagaagcagcgaagtgaacaagttttcgcgcttgcgcggaaacgagtgatacgcagcttgcttcgacgatgggtggctggtgcgcttgacgaagtcatatcaattggatttttaatttatgcctgaacatatcccataaaggggatgggcgtgtggatcagggggtgagcatccggtgtcagcaccgtgatgccgatctgttcgccgcacttggggcatttggcgatcaggtcagggtgttccgctctgtgcagagcaaacagcctgtactgagactgctccgcaccactggggatatccgcgatacggcccttgccgcacagcggacagcgcagggaattggtttttgacatagcgcctctctttctctgttctcttttttgagaacagcacatgaaaattttttacagcaggttatggttctccaaccgaatgcgcatggcctgcttggatacctgaaagatacctgccatatccgtcaccagctgttggttcgtccgtccggagcgcagctgatagaaacagcgcttgacctgcggcagcggcagcagaaggatagagcccagcaggttcgcctgcacttccaatgtgttgtcgctctcatcgccggaacggagcgccgcgttttcgccggtcccgctgaactgtttcttatggagcagccagtgccccagctcatgggcgcaggtaaagcgcagccgcccggtagatgcttcctcttcgcagagagagcagtcgatgaggatggtgccgcccttgacgggaagaaggtcatagcggtggttttcccagtcatagatcgctgtgagaccgtcgtcaaagatggtctcgcccaaaacccgcccattattccgcagatattgatactccagcaccagcccctgtgcctcgatgatgtcctcaatgggaacggctgcgggggaaccgtaataaagtctggggtcataggcggtgatcacatcgcgggcgatccgctccagcgcctgttcgcggtaatatgcttttttcatgcgtctatttcaccgccctctttggatttctttgcgcgctgggtgatccggtcgataaattcctgccactcctggtctgtggcgtctgcctccttcgccgtgcggagcgcggcccggacgatctcccgatccatgatgtagtccggcaggtctgcggatacccggttattctgggacttggcggcaagatccagcatctgctcggtttccaccttgctcagatgcagttcctgctccaaccgttccaaatatgcgcgcgtcggcgccggtctgcggtcgttttcaatgttgctcagatagactggcgacaagtccagctttgccgccagcgtgcgcagggacaatccgatagattgccgtttctcccgaacgaagctgccgaatgtctgttccaagtaactcacctcctatccgtgttctcttctctggaaacactgtagcctcagtatagcaaacattcgttcgattggcaagacgtgaaaaagatggtgttccccgcagggaacaccacccagaaattatttcagccacgctgccatatcccgcatttcctccaacactgctgctgggctgacgatgcgaatcttaccgctaaaggtaaagacccaactgaagaacggagggcttggcgcgacctcgactgtggcacggaaatgctgttcatctacagtttccgtctgcacattttcaccgaagcggtcgatgacgctgcgcatgatctcattatcgcacagcagctctacggtacagaggttgtccgggtacatcccaaacaccttacggacatactccgccggatcaaagtccggtgtctggactgccgtatgttccagcggttcgactgccgtcatgcgatccacccgaaattgtgcaatctttccgtgcttttccgaccagcctacggcataatagcaatctcggctccagataagggcatacgggctgaactgatagcggtagccgttatgcttgagtatcttttctttctgcggggtgtattcgtaataccgaaaggtgatctgccgttttttctgaatggcgttatggatctcatccacgctgtaatagatgcactcattctccggtttggcggtgccgtccatataaatatgccgatccaactggcgggcatgagattcactggtgagcttacccaacttttcaataagccgctcgctcttttttgccgtaataaagcgggaggattctaccgcgtccaccagcagcttcagctccggcagttcaaacatcctctcccccacgaaatatcgattctgggtgcttttgacgcatacgatgtccataccgctgctttgcaagacttcaatagcggaatatacgctcttgcgccccgcctgaatgccatgctcctgccagaatgcaaggatttctgacacggaggcaggatgtttctcatctgtacgtttatataaataccgctgtaagagcagcagtccatattgggatccgtttttcatgctgagacctccgatccaaattcatatcttctcttatagtttaatgagcggatcttattccgtcaactgtttctgaccccgtgatggtcaggcgcatcgcattttgtctgcactattgctttataatagaataccaacggcctgcacaagacctattctcttgctctctcaacgctgctgccgaagctgactgctccctgtgactatggctcgatcacctatgacaagagggttgttaccgatctgggcactggctcctttattacccttgtaaacggcaagaccggtgaactgacgttggaagcaaacagaagcggcacagacgaaggatgattcggcacgatcactgttacaatctccacgagcaactatcaggatatcactctgaccatcaacgtcagcgcggagaacaatatcactccgcaggcggacggcgcagtgacggcaacggacatcacctatggtcaggcactgaatgacagcaagatcgcgggcaaggtgaaggacggcgacaagatggttaacggtacgttcgcatgggtggacggcacaggcgctgtatcctaccgcattggcactgttaacagcacaagcgaggcgaccatcgatcccaacaccggcgttctgactccagtcaaggtcggctccgtgagcgtcatcgcaaccaaggcgggcgacaacgactacaacggcgtcaccagtgctcccttcgtgctcatgatcaaaccggccacgcccaccggcgcgccgaactacaccagaatcaccacaagcggcaagacgctgaaggacgcggcgctgaccatcgagggcagcacgctgaaccacaatgacggcaagctggaatgggtgaatgacaaggacaatgtcctatccggcaataccacggtcgaggccaacacagcctacaagtggcgcttcacgcctactgacaccaactacacgacactgaccggcgaggttgagctgtatcacaagtccagcggtggcggcagcggcgtgacggctccctccatcacggtccccgtttcctctgagcaggagaccgtgaaggtggatgcgatcgtttccggcagcaccgcagccgtggaggtcaccgacaagcagctcaatcaggtcacttcgggcggcgacatcgtcaccgtggacgtctccggccttaaggacgtggacagcgccaatggcaccggcgagacgacgttcagccccaacgcggattgcaccagagcgcagatcgtaactctcctctggcgttgcaagaagtgacccggctgaacagcaaagccgctgacatgaccacataagcgaacatcggacagcgtagcggataggctttttgccatgacgctgcgctgtcctgattttatattccgcatgcttccatactatcgtaaacggtaaataacccgtacctgctaaagcaggaacaaatatggcatacttatcgcagggaggctcgagggttctcgatactcctcgcggcattagcattatatataggggagacagcatggacgtgaatatgctcaggcgcagggcaagggcttcacgggcgcgtggatgttctttctgtcgtttgccgatgtgcccgaatgtgcgtatgaatccatggtgtggtgcagcatgaacggcgtaaccgcaggcgtgagcgaaacagcctttgcatcaggcaatgactgcacccgtgcgtagatcgtcaccatgctctaccggctgctggtcggctgacttaggatgggatgcagagctgaagcatctttgcggaaatttcaaatcaaagcaaactgggatcggtgcggcataaagccgcaccgatcctttttgcaatttcataaatgcaagctcaaacagatcaagtcagacacggcgcaccttccccgtacctcttccatcgcatctacaaattgttttattgcaggaggctctgtgatctaaaatagcaaagattttttgaaaaggcttgaaccaatccttcgacagagttaatatcacacccactggtgagggcggatgcgcaggtgtcgatgcgttctcccatatgtccgcttcccacgaagaagaaatttgatattaggagacccattatggaacagcactatctgacgaatgaacagatcacagcctttactgcatcactttttcaggcggaacggtctcgggcgaccattgagaaatatcagcgaagtgtacatgcattttttctgcatctgaacgggcagcctgttacaaaggatgccgtcatagcgtggaaggaccgcttgcaactggtagatggttattctccctctacgatcaacgcttttctggcggcactcaacgatctgttcacattccttggttggacagagtgccgcatgcattatctgaaaatccaacgccggctgtttcgagaggcagaccaggagttgaaccgtgaagactatgaaaagctgattgccacggccagaaacctgggtcgagagcggatcgcgctaatcatggaagccatctgtgccaccggcattcgagtcagcgaggtacgctatctcactgtgaaagcggcaaacgagggccgggccaccatctccctgaaaggaaagatccgcaccatccttcttcctgggaagctctgccgaaaactgctgaaatacgccagaaagcaaaaaattacctccggcgagatatttctcaccagaggcggaacccccatagggcgctgtcaaatctgggcggagatgaagcgcctttgtgcaaaagctggtgtggagccctccaaggtattcccgcacaatctgcgtcatctgtttgccacggtttactaccgcatctataaagatattgcaaagctggcagacattctggggcattccagtattgaaaccacccgcatttacctgattacgacggggcaggagcatcggcggcagctggaacggctgcagttgatctgctgaaacggaatctatattccgtttccgttttgcatgaaatcagaaactcagcaaaaggcaacttatcagttttgtgtttattttactctgcgctcgtaaaaatttcaagtagatacgccgaaaattcacctctaaaagtgcagaaactcagccgtgtgggatatctacttgcacggctatagaaagttacgcccattttcctcaataaaagaggaaaatgggcgtccttatttgctgtcttttgatgggcatattggaagcagaggaaacggaatatagattccgtacatagttgaaaagacttccctgtctgcgctgccggatcaatatcactgaatgagcataagcaaaatgactgtcccagccggcaaagcagttgagatgtgcccacctgcagggagctgcagaatatataaatctctcacaggaggatcaaaatgaaacgcaaagcattatctctcattcttgcgtttgccatggcagtcagtctgttcacggtaggcgcaagcgcggcggagcctacctacggcgacaccgcgggccactgggccgaggcctccatcgaacgctggagcggctacggcattatccagggcagcaacggcaagtttgacccggacggtcagcttacctgtgcacagctcgccaccattctggcaagactcctgaagctgcccgccgcaaaggacgcaggcttcatcgataacccggcggacgcctggtattatgacgctatcaaccgctgcgccgccgcaggcattctgaaaggaaacggcgatggcaccgtgacgccgaatgcgtccattacccgtgaacgggccatggtcatgctggccagagcgcttgggatcgagccgctgagccgccctgacctctccaggtatgccgacgccgcgcaggtctccccctatgcgcagggctatcttgccgcactcattgaggccggtatcgttggcggcgtgaccgccgaccgtcttgcgccgcaggacaacatcacccgtgccgctaccgttaccattcttgaccgggctatccagacctatgcggacaaggccggtgcggcagtcagcgccagcggcggactggttcttgtggtagccgatgacgtgaccgtcagcggaaccatcggccgcctgcttatccccaccgacaatatcgtcgtgaccgtcagcggcagcaaaaacatcggcagcattgcgatcaccggcaatcactccacggtcattctggacaacgccacggcagatgacgtgacgatcagcggcgtggacagcaaggtcgagacgaaaaacggttcgcacattaaaaatatcgctctgacggagagcgcttccggcgcagttgttgccgcaggcagcggaacgaccatcgacaatgttgccaacagtgcaccgggcgctgccgttaccggctccggcacggtgaaaagtgttgcgtctgacaccgacgtgaccgttgagactaagaacaccgaagtcaaaaacacgggcagaagcgagatcactgtgactgacgccaagggtaaggaaaccactgtcaagcccggaacttccaccaccgtgaacaaggagtccgcaagctccagcggttcctccggcggcagctatacgcctccggcgcagcacacccacacctggaatgcaggcgtcgtgacgaaggaaccgacctgtacagaggctggagtcaagacctacacctgcacgacctgcggcgcgaccaagactgaggagatccccgccacgggccatacctggggtgactatgagattacgcatgctgtcagcggcaggaatggaacgaagactcgtacctgcagtcgttgcgatactaccgagagtgcacctctcctttataagttctaccttggaattgaatccggcagcactgtcgatatgacggtcggcgaagactacaccgccgtgttcaccatgcctgctgcgggtggaacggtcaacacagacagcattgccctgacggcaaaaatgcaggacgttgcatctctgggcgtggagggcgtgaagtctcacaccacgaccatcagcaccggccttggcggaacagatgtcactcttaatacttggctgccgaattgctacaattttgagggtgctaccatcaatgccaccatcggcgacaagagctgcacctatacccttgacgcgatcgataaggctgattctaattctaatatgtacacgatcaccgctaccactgatcccgcggcggccagtgccgcctggcaggcgctgacctctcacgtcaccgcaggcacgcaggcagatgacagcaagattgtgatcaagaacggcgcttacctgatgatcggcactgaaaagctggagttcacgagcagcgaggtcggcgacctgacgctggacaacttcaacaacatgaatgccctcaacgagaccattcgtaaccatgtcaagctgagcacctgcgatgatcagggcggcacgatcaccgcttacctccccgccggcaccacgctggccgtcggcagcagcgttgccacgctgaaggacaactgcaccatcaccattacgctcgatgcggatgagatgggcgccctttccaccgcactgtcctctctgaaaagcaagacggatgcgacaatgatggttaaggaactcgttcagcagtttgacaacctggttggcgtgattgacgcaaccggcaatgttacggtgatcgtcagcttttccgtatgatgtaagcataaatcatcctttggacgggagcatattgctcccgtccaaaggtactatttcaaaagaagaagaaagagagggatgcgagccgtgaagcttttaaaagtgaccaaaaggcatcttttcctcgccgcgcttctctgcgcgttgaccgtaaatacggcggcctatgacaactatcagtcaatcacaggctatgaatcaccgactgatcttaccgtgcaaacaggcggcgaccgcctttggacggtggcggatggagtattgcagtccggcaacaccggggtgggcagcaccgtttccgccatcaaggtaaccgttcctcaggcgggtgtgctgcacttccaatataaggtttcttcctcctataaaacgggtgacacaggaatcccggatggtgcattggcggaaaacaatcccgactctctggtcatctgcgtggggacggagatcgcggcaggcacatcatattccggtctgccgaatggataccagcgcttctatggcgagcttgactgggcggacggctccgtcacagtggatgatgcatcggacgtttactttgcctataagaaaaataacagcaaggattccggctccgactgcgcatggctgcggaacttctccttcgccacggacacctctgcggaactgacggtgaactacgatgaaacttgcggcgatgtcaccggcgcgggaagctacgaagcgggaaccacggttacactgacggcgctgccaaaagacggctgtcagttctacggctgggtggatgccgccggtacgttcctttcggatcggccggagtacggagtgtccgtcaacaatgacatgacgatccacgcggaatttgcctcggagggagcttatgaggcccgccgcggcagcaccttctacacgagcctgacggaggcgctggcggccaataagaaaagcgacatcttcctgctcaaggatacgaccctgacggaagacgccgagatcccatccggtgtgacgctctacatcccctacgaggagcattacaccacggattataaaaacggcggcgtcagcaatgacaacaaaatcacggcaacgcctttccgcctgctgacggtcaacagcggcgtgacgctgacggtaaacggaaccctgcggcttggcgctgagatgggaaaaatgactctttgctatcagggccataacaacggcacctatggcggcgtcatcaacgagggaacgatcgccgtgaacggcaccttggacagctggggcctcatcaccggctccggcacggtaacggctgttggcggcggcaaagtttatgagccgttcatcgtctgcgactttgccggtggcaacaacctgaaaaatctctatcaagcagacgcagcgccctttaagcgctatgccatgcagaacatccagtgcaccctgcagcttgacagcggcagcaccctgtacggacggggctgcctgtatggcgacagccgctacaatgaggtggagattcccattgctgcctccggcggactgttccagctggcggacggcgctaccatcacccgaacctatgactctgaacggcaggtctccgcgttccccggcatcggcagggagaactggaccgtcagcggcggcatgaccttcggcgcactggaaatgaatgttttgggcgttcagatcagcacgggggaatgcggcttcccgctgccctacaacctgtccatgactctgaaaaacggcagctacaacattccgaaccatctgcgggtcatgcccggcgcggccctgaccgtaggacgcaaggcgaccctgacggtgggcggctccctctacgtgctggacggcttgaagcagggaagtatgagcggcgtgcgctatgcgtctacggaacagttgaagaacagcggtttctccgcctgcggcgaactgacggtggacggcggaaaactggcggtcagcagcggcgcatcctttggcggcgtggtgcagagcaccggctccggaagtatctccattgcggagggcgctgtgctcaccaacgatgtgcgggacggcggccagggttattatgcggacaataccgccatctttgaaggcttcaccgcccgcgcgaacatcggcggcgcattgcagaacctgacggcaggggagtaccacgctgtcggcaatgatgcctttaccctgcccggctacacggtgaagtatgtcaccaatggcgagagcatcaacggcaacagcggctatgtgccggagtataccactgaaacggttaccatcgaccagcccatgatcggcgcttgggcggcgggcgagtccgcgccgtcccagtatcagatcacggcggtcaacaagacctgctatgacgaggctgacaacagctgcaccagtgtggatcatgagctgaacggcgacacgctgacctttaccgtgacgaccatcaagagcgcatatacgcatctggtgcaggtgcagctcggcgagggcgagatccggactgttacccccggcactgacggcacctacacggtggccggggtgaacgatgatgtgaccatcattgtgaccagtgtgttgaagggtgatgtggacttagatggtgcgataacatcgaatgatgcatcgaccgtcctgcgtcaagtggcgaagattccaccttatctcagcgagattgcgagtctgactgctgatgtggacttggatggcgcgataacttcaaacgatgcatcgacaattttgcgctatgtcgcaaaattgattcctacactttaatatttgttaaaggggaagaacaatgaaacgaaaaaaactcttagccgtgtttcttacactggcaatgttgctgtcgcttttgccgacaaccgctctggcagcagatgcggcaacggttactgcgggtagcgcggaagtaaatgcaggagattcctttagcattgatgtcagaatcgcagataatctgggcttcaacaatttccaactgcaagttgtgtacgacaagactatgctggaactcacgaacattgaggacatcagtgatgacagcatcctgaaatctgagcttgttgtaaatccgagcgaaggaatatttacaactgcggctacgagagacaacacaaagaacggcgtaatcgcaacgttgacttttactgctaaagatgcagcgaagggcactacgactgtcagcattgaaccgcttgaaactacatctgcattgatgaaagtttccggctttgccaatgcctccgggcaggctctccccgtgaccttcgtccccggcacgatcacggtgaaggccaacacaacggatcggacggtcacctttatgaacggcacggaggcggcgaccgagaccgtggctaacggcggaacgctgacctccattccggacgcaccggctgccaccgacggccagagctttcttggctggtatgcggtggagggcacgaactatgtgctgagcagcgtggaggatacgatcaccggcacggaggccagcacgcaaaccgccatcacggcagacaccacctatcatgcgatctgggccagcagcgccatgatcgccgcgggctacgcggctgacgcaagcggcaagacgacaatgagcgctatttctactcctaacaatctgcaaacactcattaccgattgcaataacggtaaagtcaaactgctgagcgatgtggatctcggttccaatcacatcgaaattgcgcagggtaaagcaattacgctggacttgaacggtaagactctgtcaagcacggacagtaatatacctttttggggcagtacggctccctgcggtaccgtttatgttgaacaaggcacgcttacgctgtacagcagcgtagcggaaaagggcacagttcattatacattcaccggaactggaaactggaaaagtttcggctggggcgcggttgaaaatttcggcggaacgattcctgtaataaagaatgtcaccgtaaagacaactacggttggcaagggtgctacgaatccgccaagcgctcttttcggaagagcttatgccgatgctacaaccgacaatccggcttttgagagtgtttcagattgtgcgtttatctgtgacaacggcgcggcgtttacctgtgttggcgatagtgagggtgaaatgaaaacggcaagcttcaaaaactgcacgttcaccggaaccagcataggaaaaagcaatggtgttattggccttgtatatacaagggttaatgagtttaccgattgtacgattcaggcaaatgaaaattccgctgcggacgggactgcattgagcttgagcgaaaacgcaaagatcatttctgtgaccggcggaaccatgaccgctcccaacggcatctatactacatcatattacggtgatgacctcacggcgattgaaaaattcaatccgaactccgtaacggtaacggctgaggatggatttttgatgaacatcaccagtggtggttttggaaaggcggtcaatgtaaacctcaacggcggcaagtacaatacaaacaagatagtacttgagaaaggcacaaccgttacctaccctgcggggcagaagctggttgctggtgaagacggctggtacacgctccagacggcatacaccgtgaccttcaagaacggcgacaccgtgctgcaaaccgtcacctgcgggaacaacggcacggcggtctataccggttctgctcccaccaaggctgcggacgaaacctatacctacaccttcaacggcaagtgggcggacgaatccggcaatatatacaccggcaatcaagtcaccaacgttacctccgacctgacggtgatcgctcagttcgataccgcgtccgccgaggtcgtgaccctgaccgttgacggcaattccaagaactacaccggcctgaaggccgccgcggacgcgctgaacgcctccagcacttacaacagcgcggagatcaagctgaacgagaatgacacggagaccgagccggtcaccgtgaccaagagcgtcaccatcgacctcaacggacacaatctgacggcgaacaccgctgaaaacggcatcactgtctccggcggtgcgaccctgaccttcaaggattctgtcggcaccggtgtttacaaacacacggcgacaagagcggaaaaatccgcgatcctcgccaacgacagcggcacggtggtgaatatcgaaagcggcaccattgaggccgcgaagggcaacggcctgaaggtggacggcgctgcgttccatgtttccggcggtaccatcaccggcgggaacaatggcatctacgtggcgacccagaatgcaagccccgtttgcaccgtctccggcggcaagatcatctgcaagggcaacggctatgcgctgaatatggatcaatcggttgctcaatgtatcgatctctccggcggcgcattcaagaatacggtcaataccacctccgcaaatttgacggtaagatcaagtgcaccttcctggacggcaagtccctctccccctctccgaacaccgagggcttctacgaagtacgcgaggtgggcacttacacgttcgtgctcaaggctaataaggaacactacaacgccggggagaccgtcaccgtcactgtctccgcctatggccccgacagcatcaattccttcggctttacgcccagctatgacagcgacaagctggaactggtgaacgtaacttctgctaacaaaggcaacttcacggtaaacaatagtactggcaagagcggctatacggtgtctggcaacggcatcgccctcggcaaggcatccaccgacgccaccgagcttgtgaccatcaccttcacggcgaaggagaacattaacaatacgacgaccatcacgctcatggatctggagatgaccccgagcgggagcgaaaccagcgacaaagccgtcgtggagaagaagctcaccgtcaatctgcacgacattcgcgtgacgctgacggcggcgaacggcaccatcaacggtgtgaaggacgtgaccctctatgccaagtacaatgtggctggcctttacagcgatccggctcgcaagacgacggccactgtcagtgtgagcgccaatgacggctatcgtctgaacaacaagaccggcgaaaagctctggaagtgcggcgaggtggaatatgccgattttaacgagatcaagggcctgccctttacagacagcaagaccttcgacctgcaaaccacccaggtctggacggtcagtttcgacacaaacggcgtggagggcggcgaactgagcactgacgctccgatcaaggtggatgacggcacaaagctgagcgcagcaaatctcccgacggcgacggcaaacaccggctatgccttcaccggctggaaggcgggcggtaccgcgatcgaccccgacgcatatacggtccagagcaatattactctgaagccggtgttcaccgtgcagagctatgccttcacctatacgcagaaccagtccacggtcagtgttaccgctggcgtcgaggctggcaaggcgacctacggacaggacgtcacctttacggtcgcacctaacgccaagcatattgtcaaacaggtcagctacaccgttggcggtgatacggccaagaccatcgtaccggagaacggcgtgtataccatccccggagcagagatcgttggggaagttgcactggagatcacaaccgtgccttattacacggtgacgtttaaggccggtacgggtacggagctttcctctaaaacggtcttcaccttaggaaccggcttctacacggatacgacctttgcggcagacaaggtgacggaagcgcctaccccggccgcacagactggctaccgtctggcagaccataccggcgaagcgctctggaaggatgcaaacggaacgggttacacggcggagaccgtcaaaacggcggtattcaacgccgataccgtactgaccgcgcagagcgtaaagacctacaaggttacctttgagagcgcggatcccgcaaaagcaaacatcaccggcagcctgactttggacgcggatacaacgatcaccgcaattcccgcagcgacttatacggcgggctacaccttcaaggagtggcggatcggcgggattgcctatgcaagcgatgaggctttgaaggctgtggaaatcaacagcgataccactgtgacgctggctgccaaggacgccagctacagcgctacgctgaatggcggcgccgcggcggagatcacggtcattacgggcattacgggcaaccaggccgtccacggaacggatatcaccttcaagctgaccgcaaaacccggatacaaagtgacggcggttgcctatcaaatcaacggcggcgctgctgtgaccctcacaccggcggacggcgtgtataccatccccggcgctgccattaccggccctgtgacattgcagctgaccagcaatgaaactgtgacggtcacctttgaggcaggcgtgaacggctctgtggacggaacgactgctttcattctggacaagggcggcaaactgactgaggctcagctgaacgccgtgacaaagaccggcgttgcgggctacaccttcaaggagtggcagatcgacggcgcagccaagacgcaggatgagatcctcgacactgagtttgttgcaaataccaccgtcacagcagtttttgaccacgccacttacaacgttgcggcagcgggaaccaacggcgtgcccactaccgccacccacggcacaaatctcacctttacgccgacggttgacggcaagatcgttgtcggcgttacggcaaagatcgacgagaccgttgttgcggtcacgaagaacgcgaatggctcctacaccatcagcggcgacgccatcacgggcgatctgaccatcacggcgcagacggtggacggcagctggggcttcattggcaaggatacctacattgcgctgagcgctgacaagaagatcgcggtgctggcaacaggcaagctggacgccggcaattacctgctgaacggcgaggaaatgtactggtcttccaagtacaatgcctatgtcaagatcgttggccaggatgaaaccgcacagacgctgacggccaaacttgcgttcaatgcaagcgtggctgcgcagacgctttcctacaccggcgacatcaacggaagcaatacggtaacgcccgcggacggcggcatgatcaacgatgagctgcacagtgtcacacgcgcgtatcagctgacggagaaggaacgccttgaaatggatgtcaatggcgacaaaaaggtttcgacagaggacattatgcgcatcctgagaaagtatgtcggtttggactgacaaatgatcagcaggcaggcgcatctgcgcctgcctgccccatacggaggaagatatgagaaaaatactctctttgcttgtcgcggctgttctctgctgctccctcgtgagcacagcctttgccgcgtcgggcgattatacgttcagcgtacagacggaaggctctccggcagtcggagatacgatcacagtgacgctgagcctttctaaaagcggcgcaggggaattcgacctctacgcaatgcaggattatgtgcgcttcgatcccgcgtactttacttatgtggatcagagcctttcggtatataccgtgaaaaacggcgagcaggagcgtgcggtattttccgcttcaccgctcgactttgatgaggatggcgtgatcgaccgtgtctatgtcaatcgcgccagcaccagcgcagaaaaggtttcttccggcgttcaggtaatgcagttccagctgcgcgtcaaagcgcagggcagcaccgcgctgacgcaaagcggcgtggagatctttcaggatcccgcaaagcctgattcctatcatgcagcagctttgaacatcacgacccgcagtgccgacagcacaggcggttccagcggctcaggcggaagcggtggcaacgagtctacctatccggtcagcgtagacaattctgttcggaacggtggagtgacgccgagccggcgttatgccaagcccggtgagcgcgtgaccattacggttacggcgaacagcggttatgtgctgagtttgctgtccgtcattgacgcggagggcaatgaactggcgcttacagacaacggcgacggaacgttcacctttacgcagcctgccagcaaggtcgagatcaaggccgtctttgcgaaaaaaagtaatgcacagacatccttcgtggacgttcccgcaggtagctactatgcggatgcagtgatttgggcggtcggtaagggcatcaccaccggcaccagcaccacgaccttctcccccgacggcatctgcacccgcgcccaggccgtgaccttcctctggcgcgcggcgggtagccccgcgcccaagagcacggccatgccgttcaccgacgttcccgcaggcagctattatcacagcgccgtcctgtgggcaatcgagaacgggatcaccaagggtaccagcgacacgacattctctcccgacgcggactgcacgagagcgcagatcgtgacgttcctgtggcgcgctgagaagtcccccgcagcgggcagcagcaacccgttcacggatgttgccgccgacgcttactacgccgacgcggtgctgtgggccgtcaaggagaacatcaccaacggctcgacccccacgaccttctctcccgatgcaaactgcaccagagcgcagatcgtgacgttcctgtaccgctgcatgaagtaagcggcagcgatgcggactggttcgcaaaaggtttttgagtacaagcgggagatcgccgagatctcccgcttgccataaaatcgcttcattccgcaagggacggcactgcgagcgcgccgccccttttctcgtgatgtgcggcatcacaaaaaatgatttttttgaaacacagataggaacgacgctgctatctatggtataatggatctgttaaatcgcttatgacaccatagccattccctgcgaacaggctgggcgactaactgcacaggaggaaccaatgatgggctgtaccaccgcaccgggcgaaaagacgcctgcgcccgcaagggcgccgcacaaagaccatacctatgagcttgtatcaaaagttgcctatctgatcggtgttcctctgcgtatttttgaaaatgaacacgagccgccgaagctggaactgtacgatcagctggaacgggataaaaacgcacggatcatccggaatctctgtatcatccgaaccgctattgagcgcaattataaaaggatcaatgatacgatccacatggaataccgtgggctgctctccatgccggagttcattccttccgccagccttcagcagctttcggatgacggcgtcaacttcatcaaaaaacccagcacaaaactctgccatcatgtgatagagatcaaccggctgatctccgaccgtatcaataactgcaagggcctgtttccagtctggatcagctgggcatatctcaaggaactgttcctcatgccggacggcctgactgagagcggaaccaaagctgcggccagcctttactacgcaaacctgtcctattatccctaccagatgtatatcaactgggtgccggcagatgagggcaatatcctgtacagcgacaggaagtttgcggacttgctttaccagtggcattgcgatgcctttaccgagtatagcaaggtttcggatgccggtgcctttgtgaagaacaacatctacgatttcgtcaatgccagtgaaaagacggtcatcgttgtggactgcgagaattccgacccgtacaagctgtgcgcgacgctcagaaatcttgaccgcgagatcatgcggaagatcacgacgatccttcttttcgatgacatccacaccgtgaccgcatggcggatcctcgaaagctatacggatatccctgtcgagcacatcatgactgagcggatcaagcagaataagtcccttgtggacatcaagctgactgcacgcgcctgtcaggagcattatcagaaccatgtggattcctttgtgatcgtttccagcgactcagactactggggactgatctcatctttgccagatgccgatttccttgtgatgatcgagcatgagaagtgcgggccggacatgaaggctgccctcgcagacgccggtattttctactgctatctggatgatttctattccggcaacagtgaagacattaagaagaaggcgctgtttcaggagatgtaccgctggatccacagcaccgtccacctgaatgtcaatgatatgtttgacgccgccctgagaaatacccggatcgaaatgtcgccctctgagcgaaagcagttcttcgaacggcatatcaagcacatgaccctacagatcgatgaaaacgggaatgtccggctggagctgaagcgcggatgagctgtccgggcgtagattgtctggctgttcgcacatgcttcttccggaatgcgaaaatcacatcatgaggacctctgcctgcggacgccgttctatggacagaggtcctctgctgtttactcctgataaaactccggtcttgcgacagtggtaaatccagctttccctgtgaccaccacattgttgtatccgctggcgcagtggatgaccatgatattgccgctgctgtcaaagccgcaaacaatgccaacatggctgtcctccgggtaaaatacaaggtcgcccggctgggcgtcgctccaatcaatgggggtgcagtagctgtgctgggcagtggccccaccgccatgcccaatgacgtattgtccaccgctctggttgtagaacacccaatccaccattcccgaacaatccagtccgaagggccgcacggtgccagtggtggagcttccctcggctgtaactttcatcggcattccccagcgggaatcccagccgatcaccaaagattttcctccccaaaaataatggactctgcccaagagctgatatgctgtcagcacaacttctctgcgtgcctcgctgagatcggcggggaggttttccatgatcttcgctacctcgtcgggactcagctcaatgtcctggtagctgccgatgagcgccgcgaatagttcctgatactccggctgcatgagttcttccagcagcttccgctgatcggcgctgaatcggtattcatccgccatttgcaggtgatcctttaccgtgacggtgatatgcaggatgacggtgtcgccctcatattcaccgcctgagacagtctcgagatggtaggagattgcgttcatgtcccagaagatttcacgaaggatatccatttttccttcggtcagcgtagcgacctcatccggtgaagcgttgtccgtggtagtccgcacagcataaacagccagcacatcccgccagttggagatcatggcggcgctgcccgcgttgtccatgtccagttcgtcgtaggggttctccgccttgatttgctcgatgcgggtggaaaactcactgttcatcatgctgacagcatccggcatggtgtggccggtgccgctgctttctccggagaagaaaatgccgaagggggatgcgatcagaaggccaataaggcagatgaccagcaccaaggacaccaccgtactgccgccagccatcatggcgacgatcaggctccgggcggcggcgagaatggagcgcagcgcgcgattcgctgcctgcgcagttttttgaaccgcagtctctgccgcctttgtcgtccgctgatgccgggccatctgcatggccgcttctctggtaatgtgtgttccggtcgtggccgcatgggcggtggaggagcgcacggcctgttcggcggatagaccagtagctttgcccccctcacggatcttcggtacgatccccgcggcgtgctccggtgctttcggttcggggagccgatgcttcttcggcggctggatgctgccgcgctccttgatcctctccctgctgggtagctctctcccacgggatgtgggatattccgaacgcagcggatcaccgcgtagatcaacctggtgtcggaaccgctgctctgcctgcctgcgctgcgcctgctggcgggacgctttgcggccctgctcctgaatgaacgcctgctggccctgccgctgcggctccggcgcttccgttacggcgatcccgccttgagtgctgatgtaggcgttcttcgtcttgactgcctgcttcatagccgcctgccgtgcctgatcctgcgcaggcagcggaggagtgcttaccctcgccgcttcggcttctctggtgcggatgacaggcggcacgtcgctgtcggagctgggggcagaggcgtcaccctggggtgacgcgctctgctccgcgtttttcttcctgcgctgcttcagcagttccttttcggcgcggcgcaggccgctggcggcggtgtcctcaatggcgtcgccgccatattcatcccgccgcccctgctgggcggtatcccggagctgcgtccgcaggcgctccgagccgtcgtccagccccttgcgcagaagctcctttggggcggagacagccttttctttgacacgctcgcccagtgtcggtttttctttgattctctccatagaccgtcacgatgccagatccgagggcttcgtggtcatcatttggtacagcttgttcttgggaaaataatccacgaaaggcacaatggcgctgccacatttgatgagcccacgcccggagtccacattggtgatgtaggagagctgattatccgagatgttcagcaggcgcgccaattcctcccggtctgtggccgcctgattcagcatgatgagaaattcagagttcgccagcatggtgcgggccgtatgggactgcagcagatcctcgatattctggctgatccccgttccgcaagcctggtattttcgcattcgtttccacagggtgaagaggaagttggcgctgtactcatgctggaacagcagatagatctcatcaatatagatccaggtgttgcgcttcagcccacggttgcggatgatgcggttgaagatgctgtccagcaccaccagcatgcctaccggcaggagctgcttaccaaggtctcggatatcatagcagaggatacgggcattggtatccacgttggtgggttttgcaaaggtgttcaaactgccctcggtaaacaactcaatggccagcgccacgtccgcagcttccttttccggctggcggagcagctccgcgtggaagtcctgcagggtcggggtctgcccctgatacccaccgcggatgtagtcccgatagacctgggcggtgcagcggtcaatgatggacttttccttggcagacagcttcccggcgccgatgagctgttcgcaaagagacagcaggaattcggatttcagcaccacgggattctcgccgtcaccatagccccgctccatatccatggcgttgatatggttgggtgatgtggcggagatattgatgacctgaccgccaataccttccaccagcggacggtactcggcttccggatcgatgatgatgatatcgtcatcggtagacaacgccagcgacaccatctccttcttagcgctgaaagatttgccggaacctgagacaccgaggataaaagcattgccgttgagtaactgcttgcggtctgccacaatgaggtttttgctgatggcgttctgcccgtagtacacgccgccccggtcccagatttcctgtgccttgaagggcatcagcacagccaacgcctcggtggtgagcgtgcggagggcgtcgatgcggcgcaggcccagcggcagcgccgtcaccagtccgtccgcctgctgccagttcagggtcgtgagttggcagaggtgcttccgggcaatggactgcagcgtttccgtgtcgctgtccagttcctctttgctgtccgccaaatgcaccagcgtcaccactgcgaacatcatgcgctgatcacgggtggtgagatcgtccagcatctcacgggtctccttgcgctgctgttccagatcataaggcacgaccgcggaaaaattgttgttgctgttctgccggcgctgccagttggtcacattggtctccacacccagcaggcggttctgcatctcgcgcaccgcctcgtccgtggggacggggatgatgtcgatggacaacataaggctgcggttgagactggtgagttcgttgatcatggagtctttgatgtagctggcatactctttgagaaacagcacacgaccgtatttattgcccataacgaagtggtccttcttgaattccatgctgtccgggcagatggcgtccttgaaggagcgcccgttcttcatgttctcccggaggtcaaagcggaactcgctttcctcgcccacacggtagaagtcgtggaggatgcggagccgctctacggcgtctaattcctcacagtgggagtccatgtgattgaggcgggagacagcgtcattggctgtgcggtcgaagaaggtgcgggcttcttcaacatttttcttgtggacagacagggtgatgtagcgctcctgcacgacgctgttggaggagtcggtcaccttgtcgagcagcatggcgttgtactccgctcgggagccgtccagataatctccttggggagaaatgaggatatcctgctcgaagttctggcgattgatgcgcttgttgttgatggtgatcttggtggtggagccggtatccagagcgttcagcagttccgagtagccgaggaacatggaagtcttatcctctttggacgcgatggcgtagttgatgtcgctgaaccgcagcgttttcgaatatttgctgccgaattgaaaaatcccgtcaggccagagtcggcgaatgggaatgatgtcctgtacagatcttggtaccttgaattgttctttgtcctgctttaacgtggtttgcagggttttaatcaagtttcagagcctcctttacagatgagtgttccatgagttttgtgtatacgttttccgatttgaacgtgagccgtttcggcgtgagaaattctgagcgaagaaacgcccataaaaattgctcgagattcatgccgttgtactgaaaaaatccgcctagggcgaagggaaatgcggcgaggacacagacccagccgatctcaccgttcccaagcacagggcgcaggccgaagtaaacgccgaccgctacagctactgccagcagggcgaataaaaactgccgcagggacaggccgaaaaacaaactttcctgatagttgcgtacttccttgttgatgcgtacctccaatgtaccacctccgatatttttgacttttcccgaacagatgcttgctttttctgcccggtcatggtaccatgcccccaaactcgagaaggaggtcacggcaaatgatgttttggatgatcggcgccggactcggcattctggcggttctgttccgcctggcggcgctggcgcggctgacgatcccgctgctgtacacgatgtcgatgttgaccgtgtttcacggctggtatcagatccataccgcattggcggacaatattctgtttgcgctggtcggcttggtcgttctttcctggctgatctcgctgggcaaatgcgtctggagcttcattcaggagaagcgggaagaccgcgccgccgttgagtattttgcgtaccgtgtccgtaaagcaagagaaaacggtgaggacaccgtcagcaccgagggcctgtggcgctgaatcagccaaggcccatgagctcgtggatgatccggtcgctcatcttgatcgcgcccaccagcaccagcatattgaagatcagttcgcccacatagttccacacgatggtggctgccgccagtgtatcgtctgcgatggcgggcggtgaagacgcaaacgccgaaaaaatcacacaagccaatacgatgacacagccctccagacagatggcggcgtagctttttagaaaagcaatgccgatactgctggagggctgtcctgcaaagctggccagcggcacaggggcgatagcggtggcgataaagagcttaaaaaaacgactatacaccgtcaggatcatcacgagagacagcacccagataaaaagcgagccaagcagcgtcaccgcccataggggaatggagtcgataaagcccacatcctcgatgatgcttaccatttcgtccggcagtgctgttgcagacatggccgtcaggccggatgagtcgatgattgtcgtcaccatgccctgcgccacacggaatgcccccgtcatgagttccatgccccagctgaccgcagcctgggccagcacaaagcggataaagcacttgaaagccatctctggctttttcatttctgcaaagctgccgcaggttttgaccacgcccatgacaaaaaacagcaccagcagcgcataccccacagccttcaatccatcgttgatattcacgatgacattccagacaccgccgcccttgaaattctccggtgatgtggtgatgagctgccagatctcctccagtctgccgttccacatctccagcgcagagttcaggttgtcaatgatccagtttccacttcccattcaaaatcacctcctgcgggaagaaataaggggcgcagtctaaacgctgctccccttattcgattttcaactggtgataagggtaaggatttccttggtaaaggtgatcacaatgccgcctgctacggtgagcataccgttggcacgctgggaggggtcatggctcttgagagacaggcccacctgcaaaatgccgaagcccagcaggatgaggccaatggcgcggatcagagagaaaatgaaatcggacaggttgttgaccactgtcagcgggtcgtccgccgccagcgcaggcaccgcggtgactgccagaagcagggcgacacaggcaaaaacggaatagatccgctttgcctttctctcgaaatttttgttgttcaaatcatgtttcatgctgcagcattctccttttcattgtcaaaatcagtttggaacagcggctctcccggaatgggaggctccaccgttccgtggtggatgtagggcggcccgccgccatccatcgtatagcggatggcgggatgctccatgagctcatacttttcgtccatcaccggccgtgtgccgcggatgaacagaatacaataccggttatccagcatccgcacctcgtccggcgtcagcagttccctgccgctcatctggaagttggtggagtaggacccagaccgccctttggtctgcccgtgggtcttggtgtcaatggtggacttgcccagcgcctcggaaatgtacttgtgggtgcttgcctcgttgccgcccagatagagcagcgtgtccgagttgccggggatggtttcccaggaatccttgtagagttccttgatctgcgccatgttctggatgatggtgctgcaggagatgttgcgtgagcgcatggtcgcaagctcccgtggcagccccggcagattgaccgatggcgcttcgtccaagatgaaatgcacatgacacggcagtgccccatggtggatctggtcggcgcagtagtacagtgtttggaatatctgggagtacagcaggctgacgaggaagttgaaggtcgtgtcattatccgggatcacggcatagagggcgcactttcgctctcccagcgtgtagagatccatgtcatcatggtcggtgacagctttgatctgcggcagattgaagggtgccagccgcacagcggcagacaccaaaatgcttttcgctgtcttgcccgcagcctgcttgaaaaccttatattgccgcagggcaacgctttccgggttttcatactccattgcccggaacagcagatccagaggggagacatactcgtcatcgtcctccttcacttcggcatattccagcacacgcatcaccatggaaaaattctgctcatattccggcgcttcctggaacagcatgaggatgatggcctgcagcagtgctgtctcggacttcgaccagaacggatcggactcgtgacttcccttgggcgtcgttgcctgtatcagcgtgttgaccagcttcagtgcgtccttctcgtcccgcagatagcggaacgggttatagccgtctgactgcgacagatccaccagattcagcactcggatgtcgtatccctgctgtttcagataccctccggtggcggtcagtacctccatcttcgggtccgtgatcacatagttgctgtttgcttccagaatgttgggcttgacatagccgcgggttttggccgcgccgctgccgccaatgaccagcacattcagtgagcgccggtgcttgtgggtatccagccccagccgcacatggcgggtgaggatcttgttctgcttttgacggaactgcgcgttgagctgccggggagagccccatgcggcggagccgtgttcctctccgtcccgtgttctgccctgtccggaagcatagagacacagccccatgagatacgcgccggtgcagacgagaatggacaacagactcttgtctgtccattggatctggaagggctgttccagcgcggcagttaagtttgatagcagctccggcagaccgccgccaagggactgggcaatcagcagcgccgcccatatcacagggatatagaggaacaacgcaagtaccagatccgttgtttgggatgtctttttcagccgcatcacctcctgcataaaaaatacgaggtcggcagagcattccactctgccggccttactgacgaaacggctttcttactttgtcctgtccggtcgtactttttgacggatcttttccttggccggggcagacttctgccgggtatccagctgcgcctgatagcctttcagccgttccagaaccgaaggccgctcattcgacatcgtcccggcagccgtttccctgccgctggatgaggtcgatctgcctttggtatctggcaagtctgttcccgaccgagattctttttttggtgccacctcctgccgcttgcccacaggcggtgtcacaggcgtttccccctgctgggggcgttgctgttcgcgctgcggcgcctcctgtcccaaacgggcttcctgctccttagagggggcatcctgccgcgcctgctccggctgcccggtatatcggatgcgctcaaagatcatattggcgcggtcgatctccgttaccggcatgatcacatccacgacttttcccttgttatccgaatcacggatggcagagaacaggatcttctgttttcctgcccgctgcctgaattgctgatactgctccggagacatggcgaaccgccgcacatcgcgggtctccttcagcatctttgccagattgactttgccggaaatggtcttgtgttttttcgccagcgccatggtgagcgccagtacatttttaatggcggagccgctcagccggacagcgacctcgctgccggagagcatcatgcgtaccagctggtccgccgcttcaccgcctccgatgttcatgttcccgcacctccttctggtgttcttctgttttctggatgtcctgctccattacaggcgtctgctggtagatctcccggcagagcttcagcttttcccgctctgcccggatcttccgattcacctctgagagctgttcatacacttctgccttttctttcttcagcacctcctgtggaatgccgctgacctccagcagcttcacggctttcatgtactgctcaaactcccgctccatgccggtgagcccttcctcgtataacgctctgctgggttccagtgcctccgcatctgccagcgccgcgtagagcggctggcgtttcttcttccgcacattgaggagggtccgctgttttgtcaatctgcccagcgtttcctctgtgcgatgttcgaatgccgccatgtcagcaggcgttgtgatgttattttcccgcaggaatgcgaactgcgcctgataccgctcgaagcgcatgaccgcctgccgcagatgcggtgtcatgcggggcggatactgtcgcttttcgatcttgcccagcagatagagataatggacatagagggcaagaaaaccgctgtatctgggatgcttccggtacggctgatacgccggccgcgcaggcaagacaggccgcagccccgcttcgatctgttccaggttgccctggatggcagcacggattccgtcctctgtgaacaacggatctcgtctgccagggtactgaaatcgctcctgcccccgcaggcggaagccgagcctgccgccatgatggatctcataccccttatgctccatgagcaggaagaagtggccgaggtcgttggcgtcccggatggcatcccgcagatctgcctccagcatggaacggaaggtgggctgccccttggactggcgcagccactcaatgtagctgaccgacctggcaggcgcgccctgcacgatgacggacaatccatgctctcggcagagccggtctgaaatggcacggatctgctggtagtagctttgctgcgtactgtgatacttttcgccggtatctgcattcaccgaattaaatacaatatgcgaatggatatgatgccggtctacatgggtcccaatcacaacctcaaagccgtccaagtgttcctgcgcgaatgctttcgcaatttctaaagcaagttcaggtgtgatttcaccaggcttgaacgattgaatgatgtgatagcattgacgcttatccaatcgtccggtttccagctttgttttcatcatctcgcggtactctctccctggatcgcaattaaaatgtgctgttaaaatatgcccatccgttttgtcaccgttcagaacataatcaatggcttcttttaagccgccgttacggggcaggattttcgtaacagccattacttattcgctatccggaacataagctcatatacctgatccagaagatagagtccccgtttggcatcctccggcttcgcaattcctgcgttgacgctgcgggcgatctggttgatgttgttgccgatatgatgtatttccgtccggagatctttaatttcttttgttgggcgggctttgaccggtcgtccctcaataagccgtgcaagatatgcccgttttgtcagcctgcactctttggcctgacagcacagcagctgatactgctgtgttgtcagtacgatgtgcagatggtgttctttcttgttctcatccacatttttctccttcctgcggcgtatagccgcaagtttttccgccagcaggcggcataggggaccggggtatcctcggcaagctgtgcaaatgtacatttgcgcgatgcttgcgccagcgccgcccacggcggcgttggctccggccctgcggggcaaaggctctttttcaagtggtaggatgattgaaatgttgtgcgggcgcagcccgcttccttgcaaaaagaaatcagcgttccgggactgaacgctgacgaagacacttttcatttgcgcgctctaccggaatgccgtccagcgcgagggctttcttatccgagataaatgccgcgtacctggcatatccaaaaccttcggactccaccagcaggccggtgttcgcatcttggccggtgacgaacaggcagagaaatgtttccgatttttcgtcgaacctcatattcgatccatttcgggatataaaggaaacatcccgccagagctcgttcctatagcggcggtactgctctttcggcagttcaatcacctttgtgatctggaaccgcgctttctccgggaacggagccttatcgagcatatcccgcacactggctgctttcctataaaaactggctgcgttttcagacatagttctccttccttgggcagggtgttttgtagacaccctcatagaaaaaacagggtgtcacagtgacaccctgctcgttcatggaattatttagcgctcaatttgatgctgtttcttcttgacgggttgcgaagcagactgaatcaagtcgacaggaagaacaaagccttccacctgctgataatagctctcttgttctttggtgaaaattttctcaaggggagcataattttcgctggactgcgcggtgttcaatgcatgataatactcgatttttttatcgtcacttataacaaaggggagcaagttatttttcaggcactctttgaacaggataacacggccggttcttctgttcccgtcctgaagcgggtgtctccgtagcgttgatcgcgtccgccgccttgactgcggcaatcctccggtttagcatttgatccatagataccacctcttggacgaacttctgcttttattgtaccgatctccctgcactatcgcaagccattttggcgaacagcagtcgggtcacgcaactttttccagctcggttttgattctttcttttgccagatctgcgtagacatccgacatctcaatgcctgtggcggagtagccttccagaacagcggccagcaccgttgtgccggaaccggcgaaggggtccagaatgtggccgcccggttccgtgatcttcacgatgtcccgcatgagctgcaagggcttctccgtaagatgaatgcggttctgcggattgccatacttgaatacccctggcaggcagggcaccggacggctgatgggcatatccccgttggagccccagacaatgtattccgcctgctgacggaatcggcctttctgagggcggctgttgcccttatcccagacagcagtgccgcgccagatccagccggcccactggagagcgtctgtcgccgcaggaagctgccgccagtcgatgaacatacacaccggtgcgccgggcttgctggctttcctcgcctcatacagccactctgccgcccagcgggtccaggaacgctgatccttggcatccccatcaaagggaggcggcgcgttctcccccatactggaatactttctggcggtggacttgtttttctcggattgcgtccggcctccggaagcatacgggggatcggtgatgacggcatcgaaggtgccgggggcaaagccactcagcaccttcagcgcgtcgccgtggatgatctcccatttctgattatcgctcatgcgttggattctccttctttttgttatttgcggggatgctgggggatagatccgtttccacgtattcgctgatgattctcagcgcttcttcatagctgtgacagtcgccgcccataatgcggttttgcatctcctttgccttgtcggccatgccgtttcgccgcagcgttcggctggcgagagccatgagattaaaaatgttgccgttctgcccgataagagggcaggacggcttttgacgttcctgatccaatgtcttatcgctccttcttgccggagcgccggggcggtgtccggccaatggctttctgatccgtcatcacgggaatgcccagatcaccggcgcggtaaatatgcttccacatgtcatctgtccagatgggtccgtagacattgagctgctggcaggactccaaaagccgcagggacatctccttgacttttttgtcctgttccgggtgttttgggtccgtgatgggcggaaacagcagatgcggacagatggggatatcgccgtctgcgaacacctcctgggccttctgccgggcaaattcaatgttcttttccacatcgccccgcagcggagcacagataaacaccagcttcgggccgtcctgcgcccattccggcgttcgctcccgaaacatggacagatactgcccaatggcctgacgcagcgagtcgtaatccgcagcgctgggatgatagacataccagtctacatcgccatgatcatcccacaggtggggcatgacgccgctgcggaagttcgggttgctggggacaggcttcttgccccacacgtccttgaactgcagcagcgttctgtctaccacgccctccttgcggtttagaaccgtgaggcggatggcgtcgtattgatcggcaacatgggcagagaagaattccgcccgcacgcgcagatccttaccaagttcgcctacgcagacacgaccggagtattgcggacgattcataaggccgctgccatcgaacagctttctgagttcctgttcataacgcgtcatcgttccatccctcgcttcttcggcttttttgcttggggagactgctcctgctggggcttgaggatgtccttatccttactgcgcaggacgcggcggccgctgtcggagatgtggaccgtaatatctttcaagtcgttggagatctcttcgtggggcagaacaataatggaaccgctgaagcgcaaacagccgcgcacggtcccgaatacctgacaatgcccggagaggagcggcccttccgcacggtcagcaccgcaaaggagctgcgcacagccggatgcgcgggtacggccatacatcaatgcgcctctcagatatgcgtcatcttccacgcgggcggaaccatacagagcggagccataggacacataggctctgtcacaggcaatggcgtcattcatcagaattgagtcctggtccacataggcgctgccgcaggcgatcgcgtcattgaagatccaggcagcgtcatccgggtcaacagccaaattgctttcactttccacgaagccgcccaggtctccagcctttgcccaatcgccaatgtcctgcaaagcacgaatgcggtggaggaagggataggtcttgtgggcgatgtcagtgatctcatattttgaattgctcatttttcatttctcctttacgctgccatttcgaaggcattcttctgcgtgccctctgcgcggaaccgggcatcaatgtccgaaaaggtttccgcacggttgaatttctcagacacctttccggggagcgcctgcagctccagcattcttgcccagagatctggatggtggtcatagaggtgtcgcaattccttcttcttggcattgggacagaaccagcagccaccgcgattggtaaactcatagacaggcgacagcagccccgccttacggcagagctgcttggcatcatcttccgtatagaggtacttttccaaaagggacacctgcggcccggtcaggcgcagcaggcgttcctgctcatctcgggcgatgccgatgtaatgcaccgtatcaggcggcagtgttttctggtactggcggatggggcggatcttgcagtcccgctgaacatagcactttccgcagataggaaatgagcgcagctttcctttcttcggcccgcgggtgacctgtccggtaaacaggtccacataggtcttgtccgagcgaagcacacggatcggtacacccatctgctccagtcgcgggagagcggtgttgtagataaagtcccgatgctccggcacctcgcctgaaatggttttgtcgaacatcacttcgcagtagaccgcctcatccagaggctctccatgctccaacgccaataagatcgtggcaagagagtccttgccaaaggaacaggatgcaatgtgcttcaacgccgcgacaccccagcttccttggcgcggcaggcacattccagaggttctgccatgtttgtctgttcccacggggcctgctcatgggtgaagtggccatagttgcagaattggcggaagatgggcttgtccagccccagcgtgcggatcatgccatccggcgtcaggtcgaacagcgcgcaaattgcctgctccagcgcattgtcgctaaacttgccggtgccgtgggtgtctacctccaccatgacaggctgagctttgccgatggcatacgccaagctgacagtgcattctttggcgatccctgcggccacgacatttttggcgacgtagcgggccatgtaggcgccgctgcgatccaccttggtgccgtctttgccagacaatgcgccgccgccatggggcgcaaggccgccgtaggtatccaccatgagtttgcggcccgtgaggccggtgtccgcttcgaagccgccctccacaaatctgccggagggattgatgaggatctccgtgcgctcatccggaggaagctcgcgcagagagggaaggatgacgtactgcgtcaagtcgcggcgcagggcgtcgagatcggcgccctcttcgtgctggcaggacagcacgacagcggcgatgcgcttggggagtccgtgttcgtattccactgacacctgggatttgccgtccgggcgaagctccggcacgatccccagtacacgcacgtgagacagcatgcgtgtcaggcggtgggcaaacacgacagggaggggcagaaactccggtgtttcatcgcaggcatagccatatacaatgccctgatcgcccgcaccggtatcctgcttgcccttgacagcccctgcgatgtcgggactctgctcatgggtgatgacttcgacctcgtagtcgctgtcgccatatccggctcgctgcacggtcttgcagatgatggcggggatgtccgggagctgggaagccgtgatctcaccagccgcgatgatcttgcccgcggtggccatgacctcgcaggccacgcgggccgtgggatcgagcttcagacaggcgtccaccacggcgtccgcaattgtgtcgcagagcttgtccgggtggccttcggtgacagactctgcggttaaaatatagttatctttcatgttcgtgtttctccttcttggggtggtttttatgagactcgggccgtacaggaacagagaacaccatttcgttggcgtacttcttctggtacttttcaatctgctgctccgtcagggaggcgaagcgatcttccgccaatccgactatgaaaaaagtgccgcagacaatgtcatacggcactccgtggtcatcggtcagagcacgattcataggtagattcaagtgcttcccctcagaattgcagatcagtgcgaccgggtcgtcaaagggatacgcagcttcgatgtcgccgcctacgatcttttgcatggattcaaggctcccgtcgatctcctgcacagcgggcggagtcatcggctccaccacgaggatcttgagtgtttctttgctgataagattccctcctttataaaataagcggcagcagcagtctgagactgccgctgccggtatggtggttagttttttgttttcaatgccagtgtctgggttttcagcagcgcattttcgagtgcgcgctggtcttcatagtcctgccaccagtgcgggcggagaaaactcagcgccttggtggcccagatataatcatcccgccccagagactcttgcacgagtccaagtcggaacttctcgtatttctttcgtactgctgcatctacgctgtcccgattcaaatatagctccagaaagccgcagagaacagccgcttcctccatcgtatagaacactctcaagcaccccttcacacaaacaggcatcattgtagcatggagagccggttttgggaagcggcggtttccacaagatcccaccgcaaaattcggcacaaacgcttgttcgattctgcacggcgtggtatactgatcgtcagaaacaagggagggggcgcgctgatgctggagagacagagaatatacattgccatcgatctaaagtcgtactatgcgtccgtcgagtgcatggagcgcggtcttgaccctatgacaacaaaccttgtggtggcggatatcagccgtaccgagaaaacgatatgccttgcggtttcgccagccctgaaagcctacgggatacccggcagagctcgcctctttgaggtggtggaacgcgtcaaagaagtcaacgccgaacgtcggcgtaaggcgggcgggaacctctttgaaaaaagctatgatgcccgtgacctggcggctgacccattgcgtgcggtaggctatttggtcgcgccgccccagatggcgaagtatattgagatcagcacccaaatctacaacgtctatctcaagtacatcgccccagaggacatccatgtctactccattgatgaggtgatgatcgacgccaccagttaccttgggacgtatcacatgacggcgcgggaactggcacgaaccatgatccttgatgtgctgcgcacaacggggatcaccgcgactgcgggaatcggcacaaacctctatctttgcaaggtcgctatggacatcatggccaaacacgtcgcgccggatgagagcggtgtccggatcgcggagctggatgaaatgagctaccgcagacagctttggatgcaccgcccgctgaccgacttctggcgtgtcggaaagggctatgcaaagaaactcgaagccatcggtatctacaccatgggcgatgtcgcacgctgctccatcgggaaggccggggactattataacgaggcgctgctctataagctgtttggcatcaacgcagagctgttgatcgaccacgcctggggctgggagccatgccggatctccgacgtgaaagcctataagccggagacaaactgcatcagctccggacaggtccttcaatgcccttatgactacgacaaagcacggcgtgtcgtgcgggagatggcggaggctatcgcgctgaatcttttagaaaagcaactggtgacagaccaggtgacgctgactgttgggtacgatatcgaaaacgtgtcgtctgtgaatttccacggggaaacggtaacagacccttacggaaggaagatcccaaaacatgcccatggaacagccaacctgccgagaaagacatcctctgtccgctgcattaccgatgcggtactcagcgtttatgacagtaaggtcgatccgaagctgacgatccgacgcctgacgataaccgccaatcggctcgtgggagaggatgcggtacaggccgaaacggaagcacctgcgcagttcagcctgttcgacgacattgccgaacaggaaaagcaggcggtggaggaaaaggcacggctcgagcgtgaacggaagctgcaggaggccatgctgggcatcaagcagaagttcgggaagaacgcgatcctctcaggggggagttacctggaaggagctaccgccagagagcggaatggtcagatcggaggacacaaagcgtgaatagaaattacgacgatatcatcggactgccgcacccggagccgcagacgcatccgcggatgtcgctccatgatcgggctgcgcagttttctccttttgcagcccttaccggccacagtgctgccatagcggagacaggaagactcacggacagccgcgtgattctggacgagtacgagatggcccgtgtcgatgacgcgctccaaaaacttcaggagctgctgccccagaagcctgtggcatccattacctactttgtgccggatgcgaaaaaggcaggcggggcctatcagacgataagcggaagcgtgaagcggatcgatgctgtcaacggagtcctcctgctgacagaccagcgaaccatcccgatcacggatatttttgatgtatcaatcgaaccgtaataaatcagtgacgaacatatttttgcaggcgccgtcttggaagcaataagacggtgcctttttcttttgccttgatccgaaacaatctgtatggatgcgacacgacagctgccgcacccttgtcagcgctcctgccctttcggttttactttattcctcttttggggactatctactttgccgctccacacctcgtcgattgttctgttccacgcttcctccagcgactccaccggcaggccgtttgtttcaaaaccttgctgaattgcgcggtaatagcgtggatacggcagtgcgggctggcggcacattggttctgccatagtgtagaccatgacggaaacggctgcgccatctgcggtccgcacagatacctgttccttggtgtagtggcgaggataaccttcgtagcggtccagcgcctgttcagacttcggtgtgagcttccacagtagaccgtggacgacactgcttttcttgggagcgacagtggcaaagccgctgccgcggaactgcagctcatagttttccagcgtcacaggacccacgatctgggcgtcggggcagcgatgcgccatctgttctaaattgatattgctgccgtaagcaaaatacagtgtctcttccatatcagtcctccagcagagtgagtccgccaatcttatccaaatggcgaaacatggcccgtgcctgcgcttctgtgtctccctccggcagcgggcaatccatccctgtggtgcggatgacattgctctgcaaaaaccagatgtagctctcaatgtccggaaattctgtggggtcaaaggtctgatcccgcaggcggcccatgatctccatggcggtaccctcgtatatggtttcttcgatctgtatcttcaaaggcttcacctctccatttctctggattttttcttcttttgattgacttcgtaactgtccttatcgaacctccacgcgcggtcaccagataaatttgccaacaaatggttgcgggtgtttttgaattcgttaccgttgagccccaaccgcaccagccagacgcggaaggtgaacagctcgttgtcgcttacggttttccgcatgacggtgctgcgctgggagatggcctgggcggacatggcaaggcacagattgacgtaggcggcgaccttgccggcgtggagcgttgagttgaagcagcgccactccaccgtgcctcgataaaatacggagtgcagattcagcgcatagtaacgggtccagttataatgctcatggctttgcacattcccctcataccagatgctctccagcgctgtgagatttttcgtttcatctgcggagagctttcgtgctttctccagcatgggttcacgaaccttttggcagtagtgaatgactcggttgggatttacctgcaacgctttgaacaggatatcttccttggagtacatgatgctcagaaggttcttcaggctctggcggttatggttggcggcgtctacatgaacatgaatgccgcaggtgttgttgaccttggccccggcatggcgcacctgacggacgcattcctgcagcttgggaagttctgcgtaggtaagtttgggcgtcaccatttccacgctgtatccatcatcgtaaactctctcgtagccggtttcggatttcatctcggtataaatactgccatcagacataagtgtccaatccttcccagcagggtccttaactttccatttatcgtagtaaccgcctgcgctgcgtggggtcgtgccgaaatagtttgccagggcccacgctgcttgctcacgggtaatacctgtcatctcgacctcgacaccaaagcactgatccttcatcccaatcatgccacagcccccgctttcaattcctcatccaccgcccggatacgcttggcaattgcctcaattacatggacggtgacgctgttgcctgcctgcttataggcctgagcatcggactggatggcgaggatgcggtcgatctgccattcctcaaagccctggagtcgcagacactcgcggggcatgaggcggcggatgcgcccgccgttttccacgatcccttggatacagctggtttccaatgtatgggcaatattacgcccaacgcgcccgcggcgggtgttgctgcctgcgtagcccaaatccaccgtatcgccggggagtgcttccttgtagcctttcttggtcgcctccttgatgagcaggacgccggagcgttccgcccgatgattggagagagtcgtctgcccataccgggccgtgaggcaacgggcggtatccgtccgtgcggggattcctgcgcacagatccacaaacggccccttgggcgggatgatatacaatccggtcttcccgcccatgccaccagcgccggctgtctgagtacaggctactccgtctgcgtcatagacacgggagccttgcggccctccgaggacttgtacaagagcttttccacctgtgccgaagacaggtaatattttcccggcgcatcggggatcaagatatccgataatgaaaagccttcgccttgattgagggactccaaaatgtttgctgttaagcacagaccactcgacatgataccccaggtcatccagtgcggagaggatgaccgaaaaggttttccctttgtcgtgcgataaaagtccgggaacattttcaagcagcagatacggaggtcgctttgcttgagccaatcgggcgatctcaaagaagagagttcctctggcgtcggcaaagccccgtctgcggccagcgttagaaaatgcctggcaggggaatcctccgcagagaagttcgaagtcgggcaggtctgccgggtcgattttggttgcgtcgggataatatcgttcctcctttcccggctcataaatggccgtatagctggcattggcgtatttatcgatctcgcagtgcccaacgcactggaaaccgcctgcacgcgtcaagccggaacggaagccgccaataccagcgaacatgtcaaagtatcgaatcaggctgtatcatctccttcctcctgcagcgcagcaagaaagccgaggacatcatcttggatgctctcggcttttggcgctgcttctgtgattttgatctggctgccctgtaattcctgacgcacggcctgacgcacagcgtccagcagttcctgctgatttttgtgttcgcagatcatgcggcacacatgctccgtgcgcttaccggcagggatgtccatcagccgtttccatgcctgccgctggatgggtgaagccatggagaaggacaggttcagccgctttttgttactgctcatgctttagttccagccgctccgtcagccattcgtagcccttggcattcagagaaacatcgtccagaatgacgggcctgcacagtccgtctgcaacagaaacatggcgcttgagcaacgccgcgccgccgccaagaaaaacagcgggcatggcgcgaacgtccagaccactctctgcaatggcggagagcaaacgcttggcgtagcgctccgcttccagatggatgatctttttcgagtcctcattcacatggctggtatcgctgcgcaggacactttcgatttgcgccgccgtcatggacaggccgaggctgcggcggatctgttcactgatttcatccaggcagcggatcatgccgagttccaggctgcggcaggtggcggcgttggggatgcggttatccagccgcatgagatccaccgtccagccaccaatgtccgccacaatgacggacggctcgttcagcaggccactctgcgtcagcaccgcggcatagccctgcggatacagagacactttggagattgtaatggtgtaatccaggcattcaaagcggaaggacaccggctttccatcccggcacaggtagtctcggaaggcttttttgtcccggccaaaactggtgagcggcaggccggtggccagatggacatctgccatagtccccgcattgcgatattccagctcttttgcaatggcggcaagggtcaagaggtaatagtcctccgcctgcgtcttatccttctggagaggctggcgtccgctgcccaccacataaaatttgccaccgtattccagcacattgctcagcgtgtacggctcgtgctcataggccacaagaccggaggggaatgcgaagtgcgcggttttcatcgcggcatagccgtgatccacgccgatgatgatagatttgctcatctggcctcacctctgcgacgatgctgtttctttttgggggccatctgttgctggtcatacgcctttccggcacggatgagatcccgcatttccttttgctgcacattccagcgcgttttaccatcccagcccggatgcgccgcgcagagccgaggcaggtactgtttcagctccggtccctctctgggaaattcaatgccgcctttgtagacgatatcctgttccagttctgccagcagcgtttcataccttgcccagtccgtctggtcataggcgcttttgcctgtaagatgctcataggcataatctcctacataactgagcgtctcaaagcagcaatccccgtaggggatgacctccgcaagagagtcagggtctgccagcgcggacagatagacatcccttccctgggcaatgagccaggcgcgaaagtcgataaatccgtcatcgctgcagccgtattccttcatgaccccggcggcgtcccacagtccaaacttatccgcaaggtcttcataggcgtggagaatgtcgtggaagttctgcgcctgctccgcccccatggataccagtcggtctttcaggaagtccatcatagcgtccatgtcctgtccgcaggtctcctttgcactctgaatcagcttccagaaagtatctttgttgatctcggtgatgttatcgttcatgtcccacctctttcgtttctttttcctttgttttcaggagatatgccaaccccatgcgccccagtgcgtccgcgcagatcgcttcacgaaacgcgaggtattccggcgtggtggtgtccactttgccgaggatggcccgttcataggtggtgccggggacgatctcccatgtgactgcatcgaaatgagctgcttccagatagcgcagaagggtatgtccgttcgctgcctcaaacgcgccccggttatcttcataggggaaagcgtcatagggctggaagccggtgatccgctgcgcggcgtgatacagccgaaagccatcctcatccagctgcgccgcgaatttacagtagatatccgccgctgacaattcacgccgctccatccgaggtctcctttctcacccaagaagcgaagcgttccaagaagcgaacacgcttgcgcaccttcccagcagacacatccagcccgttgatctgcgcctgaatgcggcgctgaatggctttcagcttctgcggatcgttgcagcagtccacgatgacatactccccgccactggcggccagcacctcacgcttgccagcctcatcccgaatggtagacatgagacgctggcccagccgcttccgataggcatcctgcaaggcatccatatcgccacagacgccgtgccgcttcaaaatagcggcgatctcttgagaactgatccgggtctccgcggacagtctgtccaggatctcccgctgggcatcaggagggaggctgggcggtgaaggacttttcttccctttcatcgcgttggttcctcctttttcggttttttcacgacagcggacagctgcatagcctgtgcaagatatttgccctgactgttcaagtattttgccatctcgcggacgctttgacagccgaactctggttcctgaaaaccgccgcgctctgtatacagcgtccatttctgtttttcataagggcagtcctgagacaccacaaagtaccgtccacatcgttctccatccagcggctcaaagcggacgtcatcgtagaggggaccgtccaagggacagttgttcttaaaccagacatagtaattgtccagaatggcaggttcagtgattcccatgaccaccctgccgatctccttcagcctgcctgcgagggcggaatcggcgcagaaccagtcgtaccagcctgcgcggatctgtgtctctcgggatctatcctgaaacaccctattgcggaacaagtcctgccactgacggacggagagcatctccctcatgccaccacctcgccgggggcgtcatccgtgggatcggtgttccgccagtctgacggcaggatcgtctgctcgatgatatcggcaatggcggcgaacacctgggcgatttcacgggattcctttacggtgtcctggagttcctccagcgtcatgcgggtaccttccgtccagcagcggacattttcttccgtggctgtcaggagggcagccttttcgtaggctttacagaacagattggcaaccttgcccctgcggtcgatctccgcattttgctgtttgaggtccttctttgccttttcatattccagcagctccgcggcagcctgttcccgctgatcctccggtatatcctgaagctggcgggtcagatcatagcccttgttgatggacagttctttcttatccagcgcctccttgatggcctccggggcgttctcatcgatctgcatgaccttgcccatcgtgcgttcgcccagaccaactgcttcggccagctccttgcgggtatctaccgctttttcaacagaaggaaggtttggcaatgttgccgaaccttcctcggcctcgctggggcggaaattctgtccgccagcagccatgttggctttggccttggcttcaatctcgggtttcagcttcagggcaattttgccaagctcccacttttccaagttgcggcggcccttctgggtatcgagcgcccactgcttggcctccagcatatcctcgaacgagaaaacagccattgtatagggaagtccgtgcttctcgcacagcgcctgacggttgtgtccgtcgatgatgaccatatccttgttgacgatgatgggggagtagcagccgtttttgatgagatctgcttccagagcgtcgagctgctccgcgctcagaggcgggagcagctcggccatctccggcaggatcacagggctgcgttcagcgctggtatatgtgatcccggtatttttcatcaggcagcgacctcgcagctggtctcatcttccatttcctgcgcgggttcctctgccttgcggggcgagaggaactccacctcgctggctttgatgaggaaaccgagctgacgctccggctcatcctcaaaggtgatggtctcaaaatcaccggaagctgccagcttgcagcccttccaggcaaactccgcacaacgctcggccagcggaccgcgcaccttgacagagataaagtcggtgagtttgttgccgtccttatccttatagcggcggtccgaggcgatacgcaggatggcgtaaggcttgccggtggtctcgttcgttttcagggtgacgtcgttggtcaggttaccaatggcagtgatcttcagcatggttcagttctcctttgttttttacatagtgtagatgatggaaaagccgccctcccagcatgggagggcggcagaggggaagttacttgctccaggtctcgttttcgccgagaatggcggtgtgggcgttagcagcttccatgactgcgtagtacgcccaatgcttgccgctcatgtcgctgaacgtattgagcttgcgaagattgtccgcaatatagctctcatccgcttcacggcccagcaggcggttgacgatggtgacgacctcagctctggagatgttgcggtctgcgcggaaggaaccatcctcgtagccgttgatccagccgctcttggcagcggctttgatgtactcggcggcccaataaccgtcgctgacatcgccaaagtccttatactgctccatgatgtccttgttgccgtcgccgtacacatcgaagaagcgaacggccagcgtggtaaactcagcgcgggtgatggcgtcatcaggggcgaaagtgctgccgctcttgccgtaggtgacgccgttgttgttgaggtacttcacgtagccggagtaccaggcgtgggcggggatgtcggtaaacttggtgttggccgcggtggagatggtgtcgccgttcttatctgccagcaaacgggcgaagatggcggcggcctcgctgcgggtcatgctgcgcgcggggccaaaggtgccgtcagggtaaccgaggatatacacgccgtggcgctcggtttcctccacctcggggacggtcagctcaccgttcttatccgttttaccgctggcggtctggttcagatcgttcttgacggtgatatttttattctcctgcgggaccttcttgttgtcggtgacgacgattgtcacctgatgcttggcatccatatccgtgccatccggcaggatgatcgagatattgccggtcttgccgatggaaacatcgctgccaggaatcggacgcttggtgtccgtgcggataactttaacggtcagggtccagcggttgccgtctgcgtcctcatagccaccggtgaccttgccgtcctcattggtcttgccactgccggtgggaacggtgatctggcccgcggcgtcggtcttaccggaggagtagttatcattcttgtctgtaacggcaatgctcatgcccggtacagcgctcttatccttgacaagctgcacggtgacggtcgtctggtcggcatagtccagcaggcggctattcggcaagcggatggagatgctgttgtctttgcgaagcgtcacggcaacgttcgcgacggggtccttggtgtcggtatcggtgacagtcacgagatagccgcccacgatggcctcgcccctgctgtccgtggtgccgctgttgtagatcttgtcgatctcggcggtttccagcgtctcaccgcagttttcgcattccttgtgcttgctgccctcggagtcggtggtcggctccttgtcgatgacccagtcgcccggcttgtgaccggtaggctcggtgtagtcgcgcttgttgctgtcaccacagcgggtgcaggtgttggtggtgtagcccatctccgtgcaggtaggagccgtcacttcactcttgtaatcgtgaccgagcgcatttttcagcacagcgccgcagtgggtgcagagctggggttccgtgcaggtggcaggattgccgggaatatgaccagcagcctcgttgccttcaatacggtgataaccgcagcggacgcagcggtactccataacgccctcgccggtgcaggtggcgttggtgatgagagtgccttcatcccagctgtggcccagcggagcggtgtagtccgtcacgaagctgctgccgcagccatcgcagcggtggatggtcttgccgccgccctcacaggtcgcggcgatcacatgggattcgtagttatgaggcagaacggaagtgatgtcctcgatatggcggtcgccgcagacggagcactcgcggacggtgtagccggggttcatgcaggtggcggctacgggataggtcttatactgatgctctcccttgggcgtggcggtctgcttcatctggccgcagcgggagcagagctccagcagcttgccatcggtttcgcaggtggcatcgcggatgacgatgctctgccatgcgtggccgagagagttcacatagtcgcgcttttcaatcttgccgcactcggtgcagaggtagcggtcatagccaagggtgatgcagccagccttggtgcggtccagcagaatgaagtggtggttttcgccgcagcccttgtcggagcagcagttgccgccgcagttcttgtcctggcagccgcagttgggatcatcgcagccgcaggtgcatttgccgtcctcgctggcctgggtatcgcgcagccagacatttgccacgccgttttccgtcatgctgacattctgataggtgtaggtgatctcgtaataaaccgtgtactgaccttcctccgtgtaattgggcgcggaggtcatggtgcagctttcggcgctgttgccgtagcggatggaagtgcggacgccagcttcggagaggtcgctgacggtgatcgtgtggggctggccgtccacgacgccgtagtagtctgcaatgaccgccttggctgctgtgtagtcatagctggcgtagtcgcacaggctgcacttctccacggtggcaaagcggccgttggcgggctggggcaggacctcggtctccatgctgtggcgctccagcgtgcggttcacggtgtggttcgtaccgtagcaaaacgcgcagtaggtgccacctttggtggtaacggtatggtaggtatcgtccgtgtactcgtaggtcacggtttcctccagcttctgtgtaaattccgcggcgcagtcaaacagccagtaaacatttttgagatagccgtaatcagacttcggctcgtttgtgttgataccgccgcaggtttcgcagactgccttggtataatgatagccggtataatgggcgtctttgccgggaacaccgtccatgcagtcgcccttgccgacgccgtccatcatggtgccgtctgagtatttgacgttacggctcagagcggtctggccgttgcgggtatactcgggaacgcggaatacctcaaaggacgtcactttgccgcactcgccgcatttgaaggtttcacgggtcacgacgctgttgacgtccagctcattcgtgcggttggacgcctgcatccagtgttcggcggggtcatggtagctgttctgctgggccgcaaaaacgctggggaccaggctgaagcacagtgtcagcgtcaggagcatggccagcgcacggcggaaaattgtatgattcttgttcaagtgcatatttcctccttagatattttgatgggatgttaagtcatgttctgcaatgcttggttatcgccccctctccggagtgtttcttttttgcaggtattcgttccagtcctttccactgcgaggctcttctaccgttacggcatagcctctggccgagtatttgtccttgagctgctgggctgctgcccgtcccggtgcgtctgcgtccaggcaaagcgtgatgcgcttgatgctggggttgtccttcaggtacgtttccagtgcgccgtcatagaggccgcacagcgctactgcattgatcggctcgcggtggagcgagaggtagctcatgaggtcgataggggcctcgaacacgtgcaccagatctaagctgggatctgacggaatggggaagccggtattcttatcgctgcctgtcacatctccgcgaaagcctttgccgtcccggtcgtaggtcccacgcaggcctgcgtacttcgcctgtccggcgtgatcttttccgacgaacacacagttgtgatgctcggcatcctcgtacaacagaccgttgttcataaactgccggatcacctgcgcggcgatgccgcgtttgcgcaggtaggcaaagactctgcggtcatccatgtttcgaggaggcagggcgaagggctttggcggggtgtcctgcttgatggaagacactacttgagcaggggagtctctggcccgcccgttaaagacgagcaggtattcaacagcttccgggaatgtcttgccgcagaactgctgcacgagagtgatggcgtcgccgcccgtgttctgcgagtagcggaaccatgtgcggcggtccttgatccgcagactgtccatttctgctgtggtgtggtaccggccaatgcgtttgacctgatagcccaagtgggtcagcagctccagcagatccgtttccctgacaatttgcatttctgtgtctgtaaagcgtcttttgatttcgcttgccacggcgatttcctcctttctcttgaaacgcaaaaagccggtcatggcacccgagctgttcggatgccatgaccggctttcttctaaatcgtgtttttgctttggcatttgtgcgggcttacacggcgctttcctcgtcaggggtatccgtgtccgcaggggcggtctcgtcggccacacgggcctcgacaggcgtctcagcgggggaatcctgctctgtagcgctctcggcgtccgcttcgtccagtgcctgcgagatcaggcccagcacgaagtcccgctgggtgagttttttgccggtgcggagtgtttcgcgctcgaggtgacgtttgatgcgctggaagagttcttcggggacctggaatgccatggttctgcctttttcagtcatgtgaatgccgcctttctgattttccatcatgttgtaatagtcttggatgaggttggcgatgtactcgctggtggtctggcccaaccgttcccgttcttcactgactcgctcgtggagggcgatgggaatctgagcacataagtttttggtggttgccatttggctgcctccttcgtttgttgtagcgcaatcatacccgaaaggttacgagaaagctattaccaataccaccagggaatgacgcacaaacgaagcagaagcaacataagcaccgaagaagcgaaaaaaggccaccgatctgctccctgtgagggaggagagatcagtggcctatcggtttgcgcttttttatgccctggcgttcgagtcacatcagttcataaaaatgtcctgctgcatctctaaaatgtcgcctgtcgcggagaaaaactcgttgtccgaaaaatcatgtttttctaactttttgaattgaaaagtggcggtaaatatatgaaaacaccgcgcttttgcgcggcgttttctgtgctgcatctttcatcaacacattttggtgcgggcatggggacttgaaccccaacgccttgcggcacgagaacctaaatctcgcatgtctgccaatttcatcatgcccgcatatattttactatatcatatctctttcgcggcggcaaggagaaaattcgttgcaatgcgagcctgtgcgatttataatggaacagcgcgcgatatatgaccgcgcagcaccgatcatgggaggactccaccgtgcagaacgcttatcctgattattacccgctcttccgctgcatcgccggccgctgccgacacaactgctgcatcggctgggagatcgacgtggacggggattccctcgccgcctacgaccggatcggcggcgcgatgggcgagcgcctgcgtaagtgtatcgaccgcggcggcgagataccgcactttattctcgacgagcacgaatgctgtccgtttttgaacggcaaaaacctctgcgacctcattttatacggcggggagggtatgctctgccagatctgcaccgaccacccgcgctaccgcagctttttttcggagcgcacggagattggcattggcctctgctgcgaggaggccgcgcgcctcattttgaccaggccggagaagacaacgctcgtcgtgacgggcgagggggagctcgacgaagaggagacggcgctgctcacgctgcgcgaccgccttttcacccttgcgcaaaaccgtgaggaaccgatcgagcggcgaatggagcagattttatcggcctgcggtgcgcacgtgccggacgtcccgcttgcgcagtgggcagaattttatctctcgctcgagcgcatggacgaggcgtggacaggcattttggaagcgctgcgcgagcacgcagatgagttgccgctcgacgattttgccgcgcacatgaaaggacgcgagacggagtatgagcagctgctcgtctacttcctctatcgtcacgtgccgacggcgctcgacgacggggacgtgagcagcaaggcggcattcgccgtgctgtctgtccggctgcttttcgcactcggtgcgctgcaccttttgctgcacggcgagttcacggtggaggatcagatcgagttctgccggctgtacagcgcggaggtcgagtattccgacgataatatggacgcgctcttcgatgcgctgctataacaaaaatgccgcccgattcgacacggggcggcattttttgcgctttttggttgattcttatgtaaacctgtggtatcataaaaagacattttagagagtgggcgttttcgcccgatcccggcaaaaggagagaaacgagatgaagcagaacatgagaaagagaacgccgctggccgtgcttctggcgctgtgccttgccatgcagctctgcgtgcccgccgcgatggcgagcaatcggctgatgcgcgcgggcgacgcggccatcgcgcagatcgaggaggaagagggcttccgtgcggaaaagtattcctccggcggcaagtggtacatcggttacggcacggagtgcgatgccgaggactatcccgagggcatcacgcgtgaggaggcggagctccttctaatgagtaaggtcgagacctacgaggccaagctcaacgacttttttgaccgctacgacgttacgcccacgcaggggcagttcgacgcgctgatctgcttcagctacaatttcggcaccggttggatgagcggcacgagcgatttggtcaagatcgcccgcggcgaaaaggacgcgacgcgccttgaagtggcgcatgcgttcggcgaatggtgccattccggcggacaggcccaggcgggccttgccgaccgccgcctgcaggaggccgccatttatttggacgacagcacccgcgcggcggaggacgagtttgcgtatctcatcatcaatatggagagcggcgcgtcctatgagacagacttcgccgtctacgagatcggcaagacctacggtagcttccccaaagcggaaaagctcggctacagctttgccggcttccagacgagcgacggcaagaccatcacggaaaacagcatcgtgaacggcaacgcggtcgtcacggcgcagtggacggcgacgagctacaccggcaagacctataccgacgtcaacaagtccgactggttctataactatgtcatggagctgagcgagcagggcatcgtcggcggcaacggcgacggcacgtttgcccccaaccgtcccacgagcacgggcgaaatgctcaagctcgtgctgctctcgaccggccacaaggagcagaaacccagcacggcgcactgggcaagcggctacgcgacctacgcctattccatgggctttgccgcgcagaattacagcgacagccagctcgacaacggcatcagccgcctcgatgtggcgcgctttgcggccaaggcgctgggctacggcgcgtccaacacggcctctccctttgccgacgtgaacgacggctatgtgacggcgctctatgaagcgggtgtgttcatcggcacgaaggtcggcgacctgacgtatttctaccccaacagcagcatcacgcgcgcggaggtggcgacgatcgtttaccgcatctatcagctcagctcgctcgaccagaagcagaagatctactacaaggactacacgctcgatgtgctcgagggcgttccgacgaacagctataataagaacgcgtttgtcaagaacggcagcatcatgacctacaacgatcccagcgtgcgcacgcgtgtcggtatcgacgtgtcgcagtatcagggcgatgtggactggaacgcggtcgcgcgcactgatgtggactttgtcatcgcgcgcgtgggcggccgcggctacactgtgggcgcgatctatgacgacacgaagtttgacgagtatgccgacggcgcggcgagagcgggccttcaggtgggcgcttacttcttctcgcaggctgtgagcgtggcagaggcgcaggaggaggcctatcacgtgctcgacaagctgcgcgaccatgagatcacgggtcccgtcgtcttcgactgggaggtcatcggcaagagcgaggcgcgcacctacggcatcgagaccggcgtgctctgcgctgcggcgaacgccttctgcaagatcatcaaggacgcgggctacgacccaatgatctacatcaccgactacgcgggttatgtcaagtatgacctcagcgaggtcatggattacccgctgtggtacgcgcgctacgatgtggacgcgccctcgttctactacgattttgccatgtggcagtattcatccaagggcagcgtggacggcatcaagggcaacgtcgatatggacatctggttcattaagtgaagaagcaaaagaaaaggcgatggccgtacggccatcgcctttttcgttgcgatttttcttagagctcgatcagctcatactctctcgaatcgaagccgagctcggcggcggcctccacggtgtggacgccgttgaggctctcgatgcgctcaacgaggtggtcgcggcccgaatcgtcggacgcgtagacaaggtcgaggcacgcctggtcgatggcgatggggtcaagggaggcgagaatgccgatatctttcatacacgggtcctccgccacggcgcagcagtcgcagtcgacggacatgttcttcatcacgttgatgtagacgatcttgccgtcgaaaagcttgacgacggactccgccgcgtcggccatggactcaaggaaggcattctgctcggtcgtccacatctcttcgggcttgcccgcgccgtggatgttcgccttgcctgcgctggacgcgcatccgatggagagctgtttgagcgcgccgccgaagccgcccatcgggtggcccttgaagtgggaaagaacgagcatggaatcataatttttgatatccttgccgaccagatttttctggatgcgcttgccgttcgggatggggagctcaagatcgggaccctcggcatcgagaatgtcgacatcgaagagcttgctccagccgtgtttgatcatcgtgcggcggtgggcgtcggtcgtgttgcgctcgccgggataggcggtgttgcactcaacgatggtgccgtgtacggtctcgaccatcggctgccagaattcgggcgtcagaaagttctggttgcccggttcgccggagtgaaccttgacggcgaccttaccgggcagctcgagacccacggccttgtagagctccacgaccttttccggcgtgatctgcttggaaaaataaacctttgctttcatattttgatcctcctgaggcggatagtttactgcttggggcacatctaatgcgaagcgtccctataaaaacagcataaagcaaaagtgcgcgggatgcaaatgaaaaaaatgaatggacacgttttttggctgaattcccgcgcggaggtgtatatttctaaggcgtttgcagaggaaatacttgattttgacgcggggagatactataattatttcctaattgtgatatgactgtttctgatagattgcgaggattagctatggacaaagcaaaaaagaacaccgtcatccatgcggcggctgaccgcatggcggcgaactacaagagctctcagatccccatgtacggcgatgcgctgcgcatgcccaaccgtaatgcggtcatcgagatcatccgcgactgtcagaagctcattttccctgtttactacggcgaccgcgacctcttgaagctgccgccggagcaatacagcgcgcttttgatggagcacatccacgaaaagctgacgcgccagatcacgctgacgatgccggagtgcgacgagaactgcgaagtggcctatgcgatcagcacggcattcatcgagcgcatccctgccattcaagagttgctgctcaaggacctgtcggcgaactttgagggcgatcctgcggcttacagcaaggaggaggtcctgctctcgtaccccggcatgttcgccatcttcatctaccgcatcgcgcacgagctgtatgagaacaaggtcgcgatgatcccgcgcatgatgtcggagtatgcccattcacagaccggtatcgacatcaaccccggcgcgaagatcggcgaatacttcttcatcgaccacggtacgggcgtcgtcgtcggcgagacgacgatcatcggcgacaacgtcaagctctatcagggcgcgacgctcggcgcgctctcgcccgcgggtatggcgacgaacccgaatgtgcgccgccacccgaaggtcggcaacaacgtcgtcatctacgcaaactccacgctgctcggcggtgcgacggagatcggcgacaatgtcgtcgtcggtggcaacgcgtttctgacctcgtcggtcgcgcccaacacggtcgtgagcgtcaaaaatccggagatgacgttccgcggcaagcaccacaggggatgatcctgacggagggggcgcgcgtccgcctgcggatgatgcggcgggaggacgcggacgaattatacgccctgctctcggatgaagcggtgatgcgctggctggagccgccgtttaaccgcgcgcaggccgagcgctttttggagcaggcgggactttccgagccgccgctcatctatgccgcggagaatatggcgggagaatttctcggctacgccatctaccacgactatgacgagtacagccgggagctcggctgggtgctcaagcctgccttttggcacaagggctatgcggacgaaatgacggaccttctgaccgcgcttgcacggcgggaggggaagaatgccgtgatcgaatgcgtccccgaacagacggcgagcgcgcacatcgcgcgcaggcacggcttttcgtatgagggccgcgcggacagctgtgacgtttaccgcctgcgctgtgaaaaataagaaagagggcgcttcccaagctgggaagcgccctctttgtgctgctgttttgctttgcgccgatggatagtggatggaaagcggcagaagagcgcacaaaagccgacggggaggaggacctgccggcttttgtgctacattgagaaaaagagaaaaaagaatggtgacaaattaaaatatgctttacagcagcatgacgcccgcatcctcgcaggtcttgcgcgtggcttcgtcccacagggagacctgtacctcgccgatgtgcgcggtgccgatgagcagcatgcacaggcggctctggccgatgccgccgcccatggtcaggggcaactcgccattcagcagcatcctgtggaaggggagcgcgcggcggtcgtcgcagccggcgatcgtcagctgggagtcgagggacttggggtcgacgcggatacccatggaagagatctcgaacgcatggccgagcacttcgttccagtagaggatatcaccgttgagttcccaatcgtcatagtcgggggcgcggccgtcgtgcttgatgccggattttaagatcttgccgatctgcatcaggaaaacgacgcccttcttcttgcagatctcatcctcgcgctgcttgggtgtcaggtcgggatagaggtcttcgagctcctgcgtggtgatgaagaagacctcactggggagcttggtgtgcagggaggggaaagcgacattcagcgcgctgctcgtctcgctgacggcggagacgatatcgcgcacggtgcgcttgagataagcgacgttgcggtcctcggcggagatgaccttttcccagtcccactggtccacatagatggagtggaggttgtcgacctcttcgtcgcggcggatggcgttcatgtcggtgaacaggcccttgccgaccttgaagtcgtagcgcttgagcgcaagacgcttccacttggccagcgaatgaacgacctgggcattggtgccgacgtcgggaatgtcaaaggagacgggacgctcgacgccgttgaggttgtcgttcagaccagaattttcatccacgaacagcggagcagaaacccggcggagattgagggcattgctcagattgacctgaaaattgctcttgatgaattcgatggcgcgctgcatttcatagacagacagcggggtgtggtagtcctgcggaataaagactttgctcataccggtttcactccttaagaaaaagtatgcgctaattataatcaggcatattaggaaattcaatagtgaaattttaagtagttgagcttgcaaaatgagaaatttttgtcgacatggtcagcaatatggaaaaacttaatccttttgcccgttgcaatctgaaagcacgcgtgatagactgcataatgagataaaatgcagataggaggctcttttgtgagaacactcttgaaaggcgcggacattctgctgcgcaaggaaaacggatatgaaacgctgcacggcgcctatctcggcgtcgatgaggcgaagatcgactatatcggtgaggaaaaacccgaaaaggcctatgaccttgaaaaggacatgagcggcaggctccttgccccgggactcatcaactgccacagccatatcgccatgacgctgatgcgcggcatcggcagcggactgcctttgcaggactggctcttcaaggccattttcccgatcgaggacaagctcgtgcgcgaggatatcgccgcagcgagccgctttgccctgatcgagatgatcgcgggcggcacgacgagcttttccgatatgtactttttccccgaggagaccgtctgggcggtcgaagaggcggggatcaaggcgaacctgaaccgctgtgtgcagtgctttgacgaaaaccagaccgtggagcagaacacgcagatccccgaatcgctcgcgctttttgaaaagtaccacggcgcggcggacgggcgcattcacattgacttttccatccacgcggagtatacctgcaagagccatatcgtcaaggcgtacagcgacctctgccgtgaaaagggcgggcgcatgcacatccacctcgccgagaccgcgcgcgagcagcgcgagtgcatcgagcgctacggcaaaacgccgacggagtggttcgaatcgctcggcacgttcgattcgcccacggcggcggcgcactgcgtcgcggtgacggagcgcgacatggacattctgaaagcccacggcgtcagcgtcgtccacaacccgacgtcgaacttaaagctcggcagcggctttgcccccatccgccagatgatggacaagggcatcaacgtgacgctcggcaccgacggcacggccagcaacaacaatttaaatatgttcgaggagatgcacctcgctgagatcatgcacgacggctatcacaacgacccgacgttgatctccacgcaggaggtgctcgatatggcgacggtcaacggcgcgaaattgcagggccgcgacgacaccggcgtgctggccgtcggcaaaaaggccgacatcattgcgcttgatttaagcaagccccacctctatcccaatttcgacacgcccgcgctcctgacctgctcggcgcaggcgggcgacgtgtgcatgacgatggtggacggcaatattttatatgaaaacggtgaatttaagacgctggacgagaacaaggtgcgcgccgacatggagcgtgccgttgagcgcctttatagaaagtgagagagaagaaacatggagagagcggacaaagacctcgcctttttgctgcgctacgagaatgttgcgtggtttgaagacggcgaggtgcgcatcttggaccggcgcatttaccccgcaaagatcgaatttgtcacctgccgcacacatcaggaggtcgcgcaggccatcaccgacatggtgacgcagagcgcgggcccctacacggcggcgccgatgggcatggcgctcgcggcgtgggaatgccgcggcaaatcggcggacgagcagatggaatacctcaagaaagcggcttacaccatttctcacgcgcgccccacgacgcaaaagcgcatgacgcttctgtgcgacatctgcctgaaagaggccgagcgcgcgctttcagcgggggagaatgtggccgaggccatcaagaataagaccatcgagctcaacaacgtgcgctataacagaatggcgaagatcggctcgtacttagtcgatatgttccccgacaacggaacggtgatgacgcactgcttcgccgagaccatcgtcggcacgatgcttcgtgagtgccgcagccgcggcaaaaacatccggctgttctgtcccgaaacgcgcccgtattttcagggcgcgcgcctgacggcgtccgtctgccacgacatgggctttgacgtgacggtcatctccgacaatatgccggcgttcgtcatgcagaacgaaaaggtcgacgttttcaccaccgcggcggacgccatctgctgcgacggccacgtcgtcaataaggttggcacgttccagaacgccattgtcgccaagtacatgggcatcccgtactttgtcaccggcgcgcccgatcagggacatgagacggtggacagcattcacatcgaaatgcgcgacccgaacttcacgctccaagccatgggcgtgcgcacggcgatggagggcgtgaagggctactatcccgccttcgatatcacgccgccgcatctcgtctcgggcgtcgtgaccgaccttggtatttattctccctacgatctgcaccgctattttacggacggcagcatcggcaaggacaatctggtgatctaaatggaacaaaatctggacattcttcgtcaggagatcgtggacaaatcgcttgaggcgttccgcgagggcctgttttccggcacgagcggcaacatgagctgccgcgtcgcgcccgatgaaatgctcatcacgccgacgtccgtgcgctatgacgtattgcgcgcgcaggacatcgtgtatatgaagctcgacggcacagtgctggagggtgaattgcagccctcgagcgagtggcgcatgcacgcggcggtctacaaggcgtatggcgagacgaacgccgttttccacacgcattcaccctatgccacggcgtttgccgtcgtgcggaaaagcatccccgcggtgttgatcgaatcgtgcatctttttgggcggcgacatccgctgcgcggactacgccgcgccggggaccgagagtgtcggcacgaacgccatccccgcgctcagggaccgcggcggctgcacgctcgccaatcacggcgtgctcgccgtggggaaggaccttgcgcaggcatatctgcgcgcggaatacatcgaagatgtcgccaaggtctacaacttttccaaggtcctcggcacgccggtggagcttgcctctctttaacgagaaaaacagtgcggagaatgcacaaggagaacaaaaatgaaaagcatactgaaaagaaaccgcattctggccgtcattgcactgatcggcctgctcgcttcgttcgtgccgctcatttcgcgcgtgcaggcggaggagagcaacaagtattacgacatcgtcctcgactacaacagcatgcgctcgatggcgcgccagtcctcgcagtcagaggacgagtggatcgatctcttcaagtcgctcggcgtcgacaaggtcgcgctcagcgaggcgagcgccctcaacctgcacgataacgcggccatccccgtccacgcgatgaccgtgaaaaaggcggcggagagctacggatgggaagatcagtaccccgccgaggttgcgcaatggctgcgtgagagcaccgatgtgagcgacgcgatcatctggacggagaccgccgcgagctatgagtggatcctgaacgcctttgaggcccgttttgaggactttgaggccaagacgtatctggagggtgagcacggcttcatcttcatccagcagcagaaaaacggcatgaagggcgaaaagctgctcgacctgcgcctcggcatctggccggacacagtggagctgtttgagcgccacggctaccagatcatcccgcgctctgtgacggaaaagaacatgaacggcacgaaatttgccgaggcctatatcgaagtgctcaagcactacaacgcgccgtactttatgaacaacggcgacgagctcgtcggctatgaggatgacgagagcctcgagcttctgacgcagtatctcaacgagagcggcgcgagcgtcgccatgatggagcagaacgaccagagccagaaccttgtctggcccggcgttgaagaactgctcgacaacacgggctatcgcggtgtgcgcgttttcaacgagtgggcttacatccagaaccgctatcagtactgcggctacgaaggccccgaggagatcacgaacacgttctttagagccatcgccgagcgcaactgcaagatcatcttcctcaagatgatcttagagccggataccgatgtcagctgggacgccgacgagaaggagtgggtctacatcaccgacccggccgactatgagcagatgctcacggacctcgacgcgcgcttggagcccctcggctacacgcacgcgaccgtgcccgcgatggagctgaaagcgccgtccatggcgctcaaggtgctgcagggcatcggcacggcggcgctcatcgtgatcctgcttgatctattcttctttatcggcaagcgctggcgcacgatcctgtttgccgtcggcgcgctcggccttgccggcctcgcggtgctgagaccctcgatgttccgcctgatcctctcgatgtccggaggtatcttgatgccgtcgattgccgctgtcggtctgtgccgcgtactgctcgaaaaaagacgcagcgagccgcagatcaagttcggcaagctgcttggctttacgcttggcacagccatcgcgaccattctgacggcattctgcgggtcgctgctcgcatcgtctgcgctctcgcagctctcgtatattctcgagatcgacctgtaccgcggcgtcaagctcatgcagcttatccccatcgcgctcttcatgctcgcctatcttctggtctacgcctatgaggagaccggcgcgcgcgaggccgtcctcgcccacgcaggacagcgcggggagaagaaccgcgtcaagcgattcaacgcctatttcggcgagctgatgcagacgccgatgaaactcggctggttccttgcgatcgtcgtcatcgcggtggcggcggtgttcatgctgctggtgttcgcctactatatgtaccgcaccggcaactcgaccacgacgtcggcaagggagcttgcgttccgcaacttcctggaaaatacgctcatcgcccgcccgcgcacgaaggaaatgatcgtcggctggccgatgctgatgcttttcatctggtcgctgcgccgcagaatgaagttcctgccgatgatcttcggtacgggcatgaccatcggtcttgtcagcgtggtcaacacgttcctgcacatccgcacgccgtttttgctgagcctgctgcgcaccggctggggcatcctcttcggacttctcatcggcacagccgtggtcattgtggcggagctcatttaccgccttgtgcgcaggatctgcggggtgacgaatggttaacattctgatctcgggctattacggcttcgacaatatcggcgacgagtccatcctgcgcacgctcgtctcgtcgctgcgcgagcacattcccgactgctcgctcacggtgctctcgcacaatcccgcctccacgcgcgaaaaatacggcgtcaaggcggtggaccgcatgtcgccgatggcgattttgcgcgcggtgaaaaagtgcgacatgctcatttccggcggtggcagccttttgcaggatgtgacgagcagcaagagcttacactattacctctccatcatccgctgcgcggaattcttccataaaaaggtcttcatctattcccagggcatcggccccatcgaccgccccggcaaccgccgcgccgcggcggcggcgctcaagcgggcggacggtatcgtcgtgcgcgacgagcggtcggcatcgcttttggaggaaatcggcatcgcgcgcgacaaggttgtcatcacggcggaccccgtcatccgcatgaaaaagcccgatggcgatgtcggcgcggagatcctgcgaaaggcaggcgtctcgctggatggccgtctaactgtcggctgggccatccgtgagcgggacacagacagccgctttgtcaaagagcttttgcgctccatccagatgatgaaggacaagtacaacgcgcagtccgtgctcatcccgttccactatgaagaggacggcgaggtctgccgccatatcgcggcgcaactgcccgatgacacggcggtgtgcctgaatgaaaagtacctctccgaggatatgctctccatcatcggcaacatggacctgctcgtcggcgtgcgcctgcattcgctcatctatgccgccatcatgggcgtgccgctcatcggcatttcgtatgacccaaagtgcacggcgtttttgaattccgtggggctcgacaagctgagcacgaaggagaacttcacggcggagctcttcctgcccgaggccgagcgtgtgctcgaaacgggcaaggagcaggtgcagtgcgtcgaagcgcatatggccaagctttcgcgcaagctcgacacgaacgagaaaatgatctgcgcgatcatggagaaatcgaggaaacataccatgcaagaccctcaaaacaatacggaaaagaaggataaatcgggcgtccgcacggcgggcgcgatcagcttcgtctttctgctgacgctgttcgccaagctcctcggcgtggtgcgcgagatgatgcaggccaacatcttcggcaccggcatcgacgcggacctctacaccgcgtcgtataactcgacgctctatcttttcacgacgatgtgctacgcgctgtgcatcgcggcggtgccgatcctaacgaaggaattcgctgccgaccgcaagcgcggcgagaaagcggccaacaacctgttgaccatcacgctgctcggctcgctcgcggcggtcgttttgtggcagatctttgcctcgacgccgctcgtcggcacgatctgggaccttgacgcggccgagttgccgcgccttgcgagctatatccgcatcatggcctgcgcgctgccggtcgtggcggcggcgtatctgaacgtcgccatcttccaggcgaccgaccactatgaattgcagggcagcatgagcatcccgtacaacgcgttccttgcgatcttccttgtgacgctgggcgcaaagtggggcattaagggcgtcgtcatcgcgagctcgtgcgcgtggctcttacagcttgccatgagcattccatatgcgaagaaggaacattatgtctaccggccgatgctcgaccgcaaggcggactacgtcggaacctacttcaagaccgcgcttgtcacggtgctgacgacgtcgatcttcctgttctgctatctcatcgacacggcgaccgccacggcgctcaacgacagcgccgtcagcgcattctactacgccgacaagctcttcaccccgctcacgacgagcgtgctctacagcatcagcgcggtcatgttcccgcgcttcaaccgcgagttcacgaaggaggactcgaaggggtacctcggctacatctggaacgtgacggaaaacacgctgcttttcatcctgccggtctgcgcgatgatgtgcgcgttcggcacggatatcatccgcgtcatctttgaaagcggcagcttcaccgctgagtcgaccgagatgacgggcagcatcttcgcccgctacgcgctcggcatgagcgctttcgccgtgctcgaccttttgaataaggcttactatgcgatgaaaaagacgctggtgccgctgctcatcaacctcggcgttctggtgctgaatctcattttgaaccgcgtgttctacaccgataccggcgtcgcgctggcaacgtcgcttgcgctgacgatcggcgcgatcgcgatgacgatccagctcttccacggcacgaagatcgtgcgcctggtgccgctcctcaagggcctagccgccacggcggcaatggcggtcgtgctctacggtgggcgttcgcttcttgtcgcggcggatgacagcaagctgatgctcgtcgtcaagtgcggcctgacgggcgttgtggggtgcgttatttacgtgctggtcagcatgattttgaagcagaatatcattgctgatacgattaagaagttcaaaaagtgatactttttgggatttatccccacaccgtgtggggacgcggcaaagggggccattctctcacgtgagagaatggcccccttaaacccccaagagaacgcgaggggagttcccctcgccccccgacattggcagtttgtagcttgaatgactgcacgcgctgcgcaatgtaagtgcggtgtacatggcttcgccatgaatccctgcgattcgtgaccgcttgcaactgcgccttactgtcgtgaggcgcgagtgacgtttgtctggcggcagactgcctgcgaaatgcggctttgctgcgctcgccgcattgtggagactggcggtagacgggaattagtctgcacctctacaagatgggcagagcggcagcgggtagtaggagcagagacaaatcgtatagcaacactaaccgcggcaacgccgcgcgcaggtattcccattctggaggtataagtgtcattcaagcctcagactgccaatcaaaagcctttctcttgggggttcaaagggggcattctcttttgcaaaagagaatggcccctttgtcccgctcccctgcgcggcgcaggggaacaaagtacagcgctgccgcgctgtgatatgttacccttgacgttttttgaaggttaaataaccttcgagcatcaggctcgctgcgacggcgtcgacggttttcttgcgctccttggcgcgcttgccattattcaacagaatattgtgcgcgtcgacggtcgtgcggcgctcgtcccagagcgtgacggggagcgacgtggcctcgcgcagcatcacggcaaagccctcagccttttctgcgcgggggccgcgcgtgccgtccatgttgagcgggtggccgagcacgagctctgtgacctcgtgctcggagatgagcggcagcagcttttcgatgaccacttcgggccggtacgcggtgataacggtcgaaaatccagtgagcgtcagcgtgcggtcggagatcgcgacgccggtgtgcgcgtcgccgtagtcgatggccatgattttcataaaattgcctcctgagcgtttcttttgactgccagcatacaggattttcacccaaaaagcaagcgcggggcagggaagtggcgtgcggaaacggaaaaaatcgcgtcaagagaggcagcaggagagaaaaaacagtggaaagagcgcaaaatctgcgcgattttctgcaaaaacgtgcaaaaagtgcttgacggctggacatgacatgtggtatcatcttacttacctgtgaaagagggctttctttttgcgcgcttttgcttctcggcacgcaagggaaaagcacccctcaaatttgagagcagggaggcaatcgccagcttcgtgccgcttttggcaaacggagctgagtaaataaggaggtgccgttagatgcgcattaagatcacgctcagatgcaacgagtgcaagcagagaaactacaacacgatgaagaacaagaagaacaccccggacaagcttgagctgaacaagtactgccccttctgcaagaagcacaccgtccacaccgaaaccaagtaattaggaaaggctgttgaaacatggcagaagaaaagaagaaaaaggaccgcagcaagtggttccgtgaaatgagaagcgaactgaaaaaggtcgtatggcccaccgcatccaccactgcgaagaacaccggcactgtgctgctgtgctccctcgccgtcggcgcctgcatctggatcttcgactatgtggccgtttccgcagtgcacctgctgatcggtctcgcgggctgacaggagagcagtcatggctgataatgctaagtggtatgttgcgcatacttactccggctatgaaaacgcagtcaagacggccatcgagaagttcgtcgccaaccgtcatctggaggacatgatcctcgacattcaggttccgctggagaccgtcacggaagtgaccgactcgggcgagacgaaggaagtcgaacgcaaggtcttcccgggctacgtgctcgtcaagatgatcatgacggacgacacctggcatctgatccgcaacattcgcggcgtgaccggctttgtcggcacggcgaacaatgaacccattcctctgacggaagaggaagtcctggcgctcggcatggaacggcgagagatcgtcgtgcgctacaatgtcggcgatcaggtcaagatcaccgacggcccgctttcgtccttcctcggcacggtcgaagagatcgacgcagagaagaacaaggtgtgcgtggtcgtgtccatgttcggacgcgaaacgccggtcgagctggagctcgatcaggtcgaggtcgtagaaccgtaatcaccgctaaaagcgatgagccgcgtatgcggcaaacgtgggagagacgttcagtctcgccaagggcggccggaatcgccggtcgttaccacattcaatattaaggaggtgcctctcatggcacagaagatcaccggttacgttaagctgcagatccctgcaggcaaagcaactcccgcaccccccgttggccccgcgctcggtcagcacggcgtcaacatcgctgcgttcaccaaggaattcaacgagcgcaccaagaacgacatgggtctcatcatccccgttgtcatcacggtgtatgccgaccgttccttctccttcgtcaccaagactcctcccgctgccgtcctcatcaagaaggaatgcaacatcgagtctggctccggcgtccccaacaagaccaaggtcgctaccatttccaaggcctctgtccagaagatcgctgagatgaagatgcgtgacctcaacgcgagcactctcgagtccgcgatgagcatgatcgccggtaccgcacgctccatgggcgttgtcgtcgaagaataaggagggtgtgaacaatgtttagaggtaaaaagtatcaggatgctgcaaagcagatcgaaaagaacactcagtatgacgccgcagagggcttcggcctgatctgcaagaccgcttccgcgaagtttgacgagaccgtcgagctgcacgtcaagctgggcgtcgactcccgtcacgctgaccagcaggtccgcggcgccatcgtcctccccaacggcaccggcaagaacgtccgcgttctcgtcttcgccaagggcgacaaggctgaggctgccaaggctgccggcgctgactatgtcggcgagatggacctcgtcgagaagatccagaaggaaaactggttcgacttcgacgtcgtcgtcgcttctcccgacatgatgggtgttgtcggccgtctcggtaaggtgctcggtcctaagggcctgatgccgtccccgaaggccggtaccgtcactcccgacgtcgccaaggctgttcaggagtccaaggccggtaaggtcgagtatcgtctcgacaagaccaacatcatccactgccccatcggtaaggtttccttcggccccgagaagctcgctgagaacttcaacgctctcatgggtgctatcatcaaggccaagcccgccgcttccaagggccagtatatcaagtcctgcgtcgccgcctccaccatgggccccggcgtcaagatgaacaccgcaaagatctaagaaaacttaaagagggggacgctgtcccccctttagattccccctcaccagtttgcgaactggtgtcgccgcgcgatcgcggctgagccgcggtatttttctgacgcgcatgtcgtcagaaaaatcaaattggattatttttgacgcgcatgtcgtcagaaaaatgatttgcgctgtgcgcggcgcaaatatggggtattttgcggaaaaaacgatatttggggttgacaatgctgccaactctggatatactattagagcgttccaaagacagcaggtgaggtttacctcgtaagtcctgccgaggatggcaaacatttattgattgctttaccgtccttatgtcctgcatgaggacggtttcctttttagaacgcctctttcccctggcacgcgaggcgtgccgcaaaatccaatggaggtgaactcaagaaatgcctaacgcaaaagttctgtctgaaaagcaggcgatcgtggcctctctgaccgagaagctgcagggcgcagctgccggcgttatcgttgactacaagggcatcaccgtcgcggaagacaccgagcttcgcgctgagtgccgtaagaacgatgtcgagtatgcagttgtcaagaacaccctgctccgctttgctttcaacaacgtcggcctcaatgagctcgatgatcagctgaacggtaccacgtctcttgccatcgctgccgatcccgtcgcccccgcgcgcgtgatcgccgactttgccaagaagctcaacggtaagttcgagatcaagggcggcttcatggacggcaaggtcgtcgacatggccaccgtcaatgctctggccgcgatccccgcactgcccgtcctgcaggcacaggtgcttggcaccatgctggctcccatttcgggcttggcttgcgtcctcaagcagatcgccgagaagaacggcgctcccgccgaggaagcttccgcagagtaatcgtctgcacccaactcaaaaactaaaacaaatatcttaaaattggaggatcattacaatgagcgagaaagttaccgctatgatcgaagaaatcaagggccttaccgtcctggagctctctgagctcgtccacgctctcgaggaagagttcggcgtttccgccgctgctatggctgctcccgctgccggcggtgctgcccctgctgctgaggagaagaccgagttcgatgtcgtcctcgccggtttcgacgctgctgccaagatcaaggtcatcaaggctgtccgcgagatcgctggcctgggcctggccgaggccaaggctttcgtcgagtctgctccgaaggctctgaaggagggcgtgtccaaggaggatgccgagaacttcaagaagcagctcgaagaggctggcgcgaaggtcgagattaagtaatctcaccctactgcgaggttcaaaaagcccgtgtcgtgagacacgggctttttctttttgactgtcttatggaatagaacatctgttgacataatatatgcgcgtgtacgtcaaaaggacgtgcgcaccgtgggctcggacggggcaacgatgtcgatgatctgattctgtgtgtaaatgccgtagtgcttccacgatgcgggagcgtccgttccatcgggtataagatggacatcaatggcatggggaagatagtcgagcagcttggaccgttcgaacgtgcaaagataggtgccgctgtggacttcgtctgcgtcaaatacgcagtaggattcgttgcgcacctgatagagcaggtaattttcaaagatgagctcgatcttggcgttttcatcggggcacagcggcgtacagtgcgcgagaatgtcgtcgagggcggcatttcctgtggacggagtctgtgcatttggctccgctttagcgcagcagatggtgatgtgcagctcgttttcatcctcctcacacagcgtcaggagaaacggtgcacggcggccggcgtccacaaggcggcctgcttcggcgaatgtggtgcaatgagacgtgggagtcacctcgttttgtaaagtatggaaaatactgctcaccgcatgacggtcaggcagtaaaatgataaccggtttgtctccttgttgttccagaggttagtttcgccgagctcgcgcagatcgtcctcgacgaattcatcgaatcgcacagcagcgcggtgaatgacggggcgttcatcgaacgagtagaagccgccctgccagacgtgccagagctccacgcagggcgcggattcgagggcagagccaatgtagtcgatcagctgccgcgcgcggccctcggtatagtaggcccagtcgaggcagacggcaaaggctttgtcggtatagagaaaactgtctgggtaagtgcgcagcgcgaagttgtcgtccgcgccgccgtcgtcgatcgtaccgtcgtccacattgatggcgaggtagtcgtactccggcggaggaaagacctccggcagcggcgcgtcggaagcgaaaaagatgcaggcgctcatcatgatcctcctgtaatgcctcattttccttttgatacggcgatcatatcataaaagatatgaacaaatctactgcgatgctgttacgagacccttgcgccgcggtgcgggaagaacgcgcgccggtgaggaaaaggctggaacagccataatataaaccgctcgagcgcttgacttttttgtgcagcggcattaaaatgtataaaatataagagcaggattttcatgcgttgtgtatcctgcgtacaaattctgatgagagacaggctgatgcccgcgtgagccgaggaatgcttacgcggttattttttcgcctggatgggagaaaacatgaagaacaccaaaaactttgcgagccgatggggctttattctggcatccgtcggttcagcggtcggcatggcgaacgtctggggctttcccaacaagcttggcagcaacggcggcggggcatttttgctcatttatctgctgtttattttcattttcagctacgtgggtctgcccgcggaattcgccatgggccgccacgcggcgacgggcacgctcggcgcgtatgaaaaggcatggtcgacgcgcggcaagggcgcaggcaaggtaggaggccttcttggctggctgccgctcgcgggctcgctgtgcattgcgttcggctacgcggtcatcgtcacgtacatcttaaaggcactggtggattcgctcgtcggcacgctgatgacggcggacaccgcgtcgtggttcggcacgttctcctccacaccgtattccgtcattccgtaccacatcatcgtggtcgtggggacgctgctgacgctctatttgggcgcgcacagcatcgaaaaaaccaacaagatcatgatgccgctgtttttcatcatctttctgatccttgcggtgcgcgtggcgatgctgccgggcgtaagcgagggctaccgcttcatgttcactccgcgctgggaggcgctcaaggacccgatgatctggatctgggcgatgggacaggcgttcttctccctctccgtcacgggcagcggcatgatcgtgtacggcgcgtacctctcgaaggacgaggacgtcgtcggcgtcgcgcagcacacggcgctgtttgacacgatcgccgccgtcgttgcggcgctcgtcatcatccccgcatgcttctcctacgggctggacgtcggcgcgggcccgagcctgctgttcgttacgttgccgaccattttacaggatatcccgatggggcggctgttcgccatcatcctctaccttgcgatgatcttcgcgggcgtgagctcgctgcagaacatgttcgaggccgtggcggaatcgctgctgcacaagttccccaagctcagccgcacggcggtgctggcgatcctgtgtgtgctgtgcctcggcatcggcattttcatggagcccatcagcaagtggggtccgtggatggaccttgtttccatctatattatccccatcggcgcgacgctcggcgcgatctcgtggttctacgtgatgaaaaaggacgaactgctcgccgccgtgaacaccggcagcaagaaagagcgcggtgcgctgtggtacaacgtgggccgcttcgtctacgtgccgctcgcggtcatcctgtgctgtgtggcgctgttcatgcacgtggcattctgagttccccctgaacaaaaaaggaaaacaatatgaaggcgagcaagaaaatatgcattgcgattctttcggtgctggcattgacagcgtgcgctgtgggaatcatccggagcacgacctttccgctggacccggcgacgctgccggaccatatctgtgatttttacaatatcggcaggccccagcccctctcgccgagtattcgggtgtacgacagtgttgaactcaaaaatactgtgtggtatctcatggagattggcgaggacatagatctgggctatgtcaagctggaacggaatttccttggccgctacaagattgtgcgcctcggctacggcggcgggagcttccgcgacggcgttgtgcgcagcggggagaaagccaactacctctttggcgggagcgatgtgaccggccgcatcgccaaaatcaccatgacgcagaacggcgagacctgcacgatggaaaatgcggagggaaagacgcatttcctgttctgcacagagctttctccacaactcggcgactatgacttcgaccgcagtacgctgcggttttataacaaagacgggaacgacatcaccgcggagtacaatttaaacggtggtggaatcgcgtaaaatcgacataaaaaaggaagtgcctatcgtaagggcacttcctttttaaataaacttgttgacgaatcaacattaatgcgctatgataaacaagcttgttgatttgtcaacaaataggaaaaaggagaattatcaatggaggagcgctttgagacctttaccgtcctgatcacgcgcatcagccgcagcatcaagcgcatcaaggcggacgaaatggcggacttcgaactgaaagggccgcatgtgtcctgcctctactacctctcccagcgagacggtatgacagccgccgagctctgcgagcgctgcgatgaggacaaggcggccatctcccgctcgctggacgacctcgagaaaaacggttacatcacctgcgcaagcggcgcgggcaagcgctataagagcccgctgcgcctgacggagcggggtaaggcggtcggccgcgcgatcggggagaagatcacgcgcatcgtcgaggcggcatctgagggcctgagcgaggccgagcggcagacgatgtaccgcgcgctcgcgctcgtgagcgagaatttggaacggatttatacccataagaagaccgcgggcgacagagccgcccgcgacgaacaataacggaggaaaaacatgagtgttcagatcattgtggattcgacggtcgacatgcccgagcgcatgaagggccgctttcgcatcgtgccgctcacggtgcactttggcgcagaggagtatatcgacggtgtgaccatcgataagcaccgcttttatgagcggcttgtcgagagcgacgagctgccgacgaccagtcaggcgacgcctgcggcgttcgacgcgatcttctccgatgttgcgtcggtgggagacagcgcggtcgtcgtgacgattgcatcgaagttttccggcacgtaccagagtgcctgcatcgccgcggcggagtacggcaacatctacgttgtggacagcaagagcgcggccatcggctcgggcatccttgccgagtacgcgctcgaatgcgcggacaagggcatggatgcgaagaccattgccgaaacgctggagaaaaagcgcgacgaaatttgcctcatcgcgctgctcgacacgctcgaatacctcaaaaagggcgggcgtatctcgaagactgtcgcgtttgcgggcggacttctcaacatcaagccggtcatcaccgtggtcgacggcgagattcaggttatcggtaaggcaagagggtcgaagcagggcaacaacctgctcgtgcagaaaatccacgagagcggtggcatcgacttcgacgagccaatcatcctcggatacagcgggctgagcgattcgtatctcaaaaaatatgtcgaggacagccgcgacatctggcaggacaaggcggactcgctcgactcgacgctcatttgcagcgtgatcggcacgcacactggccccggcgtggtggcggttgcattcttcaaaaagggctgaacctctaaaaaatcagaaacagcaggaagccggcgtgtcgcgccaacttcctgctgttttttcttaaatattctctttgacccagcgattaaaataccaacggcgctttcgaatggcgctggcactcgctgtagcttgacaacagacggcacggcgaattatagtgattctataaaggcatattgatattcagaggctatgtcttgcgtgaaagcggtgctttgtgctggtatcggtttgcccgtgaaacaggttgaatgggaaaaggagaatgcggtatgttctggacggaggagagcatcgcgcttttgcgcgacgcggcggcgatgaaccgctattatgagaccatcgcggagaggatcgcgccgcagctccaagaaaacgcgcacgtctgcgacgcgggctgcggcatcggcgagctgagccttgctctgaagccgtactgccatcatgtcacggcggtggacgcggatgcgctggccatcaaaacgctgaaagcccacctgatagagggcgtcaccgcgcgctgcggcgatatggagacgcttgcgccggagaagtcctacgacgcgatggtgttctgcctctttggccgcacgcaggatacattacgcatcgcgaaaaagcagtgccgcgggagaattttcctcgtcaagcgggactattcgcatcaccgcttcagtgcgggacaggtgagcctcggcgagtacacggcggggagcacggagaatgttctgcgcgaaaaaggtatcccttacaccgtggagcgcttcacggcggagttcggacagccgttccgctcgctcgaggcggcggagcgctttttcgccctctacaaccgcagcgaaagcgaagtactctcgaaagatgaaatcagagcgcgcctgaccgcggggccgtcggcggaatttccctactacctgccgcacaaaaaggcgttgtgcctgttcaccattgagacggcggctatttcgaaggaggaagcagtatgaaacggcattttttgatctgcggggagcgcggcgtcggcaagtcgacgctgatccgccgcctgctggagcatagcacgcgggaggtcggcggctttgtgacaaagcggctgccggtcgcggatgaaaacggcttttttccaatttatctctatcccgcatcgcagagtgagggcgagcggcgcaacgagacggcgaatcttgtcgggacgtgcgacagccgctcgagcatccgccatccggaggtctttgacggccttggcgcgcagctcatcgagtccgcgccggaaggcggcatcattttgatggacgagctcggctttctcgaaaatgacgccagggcgttccagtccgcggtgctgtgcgcactggacggcgacacgccagtgcttgccgcggtcaagccgaaggacacgccgttcctgcgcgccgtgcgcgggcacgaaaacgcagagctcgtcttcattgacgagcagaaccgtgacgcgcttcttgaaaagctcctgccgcacattttgcggtggaatgaagcttgaagcagcaagctcgccgtgcaatagagaagaagttttcaagcgaacacttgtttgactatcaaaaccgtgctataataccgccattgaggaattggcaaaggggagggggacagcacatggaggacttgcttgcgggcttgaaccgcgcgcagcacgaggccgtcacggcgacggaggggtatgtccgcgtcatcgcgggcgcgggctcgggtaagacgcgtgcgctgtcgcaccgctttgcgtatcttgtcaacgagctcggcatcctgccggggaacatcctgtgcgtgacgtttacgaacaagtcagccaacgagatgcgccagcgtatccacgccttgaccggcgacaacgacacgggctatatcaacacgttccacggcttctgtgtctccgttttgcaggaggacagccatgcggtgcagtacccgaagagctttctggtgctggataattccgacatcgacgcgatgctcggcatcatctacgaagagcgcggcctcacactgcgcgacatgacctattccgccgcacgggacatgatcgagatccgaaagctctttaaggagccggagtattacaaggacatgatcacgatgtcgctcgacacgctgcgcgaaaagtacgagcgtgccgacacggcgggggacatcatcttctacggctatctctatcaggagaaaaagtgcttcggcctcgactacaacgacctcatcaagttctcgctctatattttcgagcagcacgaggacatcaggctcaagtggcagcagcggctcgaatacatcatgatcgacgagtttcaggatatcgacgcgctgcaatatgagctgatggaggtgctgtgcggctatcacggcaacctcttcatcgtgggcgacccggaccagacgatctacacctggcgcggcgcgaacgtcaagtatctgctggatttcgacaaggtttttccaaatgtgcagaccatcatgatgatggaaaactaccgttccacgccggagattttggcggcggcgaactcgctgatcgcaaaaaacggccaccgcatcaaaaaggacctgctcccgacgaagccctcgggcgagaaggtcgtctgccactttgccgacacgcaggaggcggaggcgtattggatggtgggcgagatgaagcggctgcatgatcgcggtctgccgctgcgggatatgaccgtcctctaccgcgcgcactatgtgacgcgcgcggtggaagaggcattgatgcacgaaaaaattccctatacgatctactccggcgtgcagtttttcgaccgcatggagatcaaggacgcactttcatatttgcggatgatcgcctatcaggacgatctgtcgttccagcgcattgccaacgcgccgaagcggaacctcggcaagcggcgcatggcctttttacaggagacggcggaaaaagaggggacgagcctctatataacgctcaaaaaccacctcgaagacagcgtgttcagcggcacgaaggcaaagcagttcgtcgatctgatcgagcgcttttcgcactcgtatcagggtcggcccatctctgaggtgctctcggatattctggacaagagcgggtatgaaaaggcgctgcgcaccgagggcagtcaggagcggctggacgatctggccgagctcaagcagtccatctacgaatacgagacgagctgcggcgaggagagcacgatggagcattacctcgcccacatcgcgcttttcagcaacggcgatgtcgccgagcagggcgacaaggtgaagctgatgaccgtccacgcggcgaagggcctcgaattcccgtatgtattcctctgcggcatgaacgagggcattttcccctcgcgcagggtgcgaacgctccccggcatggaggaggagcggcggctcgctttcgttgcgctgacgcgcgcggagaaggggctttacctctccgaggccgacgggtggaattttgacggctcgccgcgctatccctcgcgctttctgctggatatcgaccgcgagcttctgtcgttcacgcacgaggtcgacgagacgcttctgcgtgaagcggcggatgacgtcgcgcggcgagacaagtatctgcgcgaggaggacggcgacggcacgctgcccatcgggcagcgcgtgcgccacgcggtgttcggtgagggaacggtgctggacgtggacctgaacaagggcgcgcacgtcatccagtttgacggcatgggaacgccgcgcagcatttcgctgcgcgcgaagctcgaaaagatcgggccataaatcggttgacagatttattttggagggatttcgacatgagaaagaattttggcgcacagccctggatctattcgtagcccgtgctcatcatcgcaagctatggcgaggacggcacgcccaacgcgatgaacgccgcctggggcggcgtggccgacagcagccgcatcgcaatgtatttgagcggcggccacaagaccgtgaagaacatcttaaagcgcggcgcgttcaccgtgagcaggggcgacgcagagcatgcggcggcctgcgactatgtgggcatcgagtccggcaacagcgtacccgacaaggtggcgcgcgcgggcttccacgtgacgaagagcgagcatgtggacgcgccggtgatcgacgagctctcgctcgcgctcgagtgcaagctcgtgagctacgacgagaagacaagactcctgaccggcgagatcgtgaacgtcagcgtggacgagcgtgcgctcgacgaaaacggcaagctcgctgtcgaaaagctgcacgtcatcacctttgactacgccaaccacggctattatgtcttgggcgagaaggtcgccagcgcgttcgaagacggcaaaaaattcaggtaaatccggcgaaacagaaagcgccgcgtcccgtattttcttcgggacacggcgcttttttgccgtttcggtcaggatttcgaatttgtttgtgcaaaaccgacgcattagtgttaaaatctcgctaaaaaccgtcccttttactactggcacgggcgtggggcaggtggtatagtaaacaggcatgtgttttttaggaggatcaatatgttttctgcctttttttgcagcctgaaacaggaatttgcaggctacaactcgaaaaagctgctcgccgacatgatggcgggcctgacggtctgcgctgtcgcgctgccgctggcattggcattcggcgtttcatccggcgcgagcgcggcgtccgggcttgtcacggccatcatcgcgggcgtggtcatcgccattctcggcggcgcgtcgtaccagatctcgggccccacgggcgcgatgagtgcggtgctcgtcggcatcgtcgcggaatacggcctgcagggtgtgtttttcgcctgcttcgccgcgggtgttctgctgctgcttgcgggcatcttcaagctgggtcgcttaattagctttatcccgatgcccgtcatcatgggcttcacctcgggcatcgccatcatcatcgcgatggggcagatcgacaacttcttcggtacggtgtcggagggcggctcgaacctggaaaagctcgcgtcctacggccgtcttggcttccacccgaacatgcaggcggtgctcatcggccttctcgtcgtgctggtgatggtcttctggccgaaaaaatggggcgcgcgtgtgccgggctcgctcgtcggcatcatccttgcgacgatcgtcgcgacagtcgcgggcatggatcagctcgctgtcgtcggcgacattcccaagacgctcctgctcgccgaccgcctgtcgctcggcggcctgagcttcacgatgctcgaaaacctgatctctcccatcgtgaccattgcggcgctcggcatgatcgagagccttctttgcggcgcgtcggcctcgcgcatgaagggcgaagcgttcaacgccgatcaggagctgatcgcacagggcgtgggtaatattctgctgccgctttttggcggcgtgcccgcgaccgcagccatcgcacgcacgagcgtagcggtcaagtccggccagcagacgcgccttacgagcgtgttccattcgctgttcctgcttgcctcgatgttcctgctcggcggcgtgatggcgcgcctgccgctctcggcgctcgcgggtgtgctgatggtcacggcatggcgcatgaacgactgggagggtatccgctacatcttccgccacaagttcaagtccggtatcagccagtttttgattacgatgctcgcaacggtcgtctttgacctgacggtcgcgatcctgctcggcgtggtatactccgccattttgtacatggcgaagtcgagtcatatccatgtgaatttctccgatatcgacgcgaacaagctgcgctcggtggagggtaagccccccattcttgagacctccggcgtggcgtacatcacgggcgcgctcttcttcggcgcggtggatgagttcaaccaccgcatggcggagatgccacagtacgaccacatcattttgtcgatgcgcggcatgccgagcgtggatgtctcgggcgcgcaggcgatgctcgaactgtgtgagtcgctcaagagccaaggcaagacggtcgcctgctgcggcatgaccgaggcggtgcgcagctactttgaccgcgcgggcatcaccgagcttctcggcgaggagtcctacttctggagcgccgaccaggcgatccttgacctgctggacgcggagatcgtggaataaaagacatagaaaagcacttcccgccagcggcgggaagtgctttttgctgtacatgggctgcgaaagattttatttgcgccggtcaccctcgcgtgcgatcttgtcgagcgattcctgccggacagcctgacgaagcgccgtcaggtagggcgaaaaggcaacgttctgctcgccgtaggtgagctggaggtcgtattcgtggtcctcccaggtcgaaatgtcggactcgttgtgggagatcacggcctcgagcttgtcgagcgccttgtagatttgggcctcctgcgtttcaagtgcggccatctcgtcgtagagtgcgcgcatctcctcgcggcagggggagggaagcgatgcgacccactggtagagcagcgcttcctccgtcgattcgtcctgtgcggtcttttcaaaggcggggatatcgcccgtgaagcactcgccgaggtcgtggatgaggcacatgcgcgtcaccttgtccatgtcggcctcgggaaattcatcgcgcaggaaaaacgccatcagtgcgatgcgccagctgtgctcggcaacgctctcgtgccgcccgccggaggtgtagcagtggcgggtggtgtccttcaatttttccgccgtgtgcagcgcggcgagcagttcgcttggtctcatgcgtctcctccattgtcgttttctggtattttaccagaggcggaaacgacttgcaaggaaaagaaagaagagagatttccgttcccagcggcatatgatatcatgaatgtgagaaaatttggcgcccggtgaaacaaaacgggcgcggaatgcgtctaaataagcagaagcaagaagatttgagagagaccctcccatgcggagggcggagaggagaatttatgaagcttgcggcggattttcggcaggcggcgcgcgaggcgctgcgcggcaagtggcccattgccattctgatcggccttgtggcggtgctgctcggcggcgcagagagcggcggtccggaggtcaaattcaattacgatgtgtcctcgggcgtgtcgacgacgtttggctacggcggacagacgatttactccacaggctacggtttggacccgaagtggagcggactgctcgtcggcggtgcggtctatctcatcgtgatcgcgctcgtgttggcggcggcgtacttcatcctcggcagcatcgtgagcgtggggtatgccaaatataacctcggccttgtcgaccgcacggagccgggctttgaggcgctgttcgcctatcttccgaactggaagacgacgacgctgacgcggctttggaagggcctctatattctgctggggacgatcctgctcgtcattccgggactgattatgggctacacctacgcgatgacggactacattttggccgagcacccggacatggcgccgggcgaggtgatgaaaacctcgaaggcgatgatggagggcaaccgctggcggctgttctgcctgcaattcagtttcatcggctggatgctcctcagctcgctgacgttcggccttggcaaccttgcgctgcgcccctatcaggaggcggcatacgccgcgttctaccgcgaggtatcgctcgggtaaaaagatagagagaaacaaaacgcgccccgcggatgatccgcggggcgtatttttgctgtgatggaaagcttactttgcgctgtcgtttgcgagggcctggtcgatcagcttctggagcgctgccatgttgtcctcattgtcgatgccgccgagcatcgcctcaccgacgatggcgccgctgcggtcgatgacataggtggtcgggaaggccatgatgtcacccgcaaagtcgccggctgcgctgtcggaggggaagtagatgttctggtagcttgcgcccttggattcaagcagactcttggccgtgctgatcgcatcggcgttgccgtcgagcgtatcgacgttgatgccgacgaccgcgccgccctgcttcttgagcgtttcattgagggcattcagctcaccaagctccgccacgcagggcttgcagccgctgaaccagaagttcacgaccgtcacggcgttctgggagaaaatgctgttgtccacatcgttgccgtcaaggtccttgccggtgaaggcggggaaggccgggacggaatcgttcatgccgccgtcttcaccgtcgcccgcgggctggagggcggcatactgctcctgcaggggctggatttggtcttcaaggtcacggatctgctcggagccttcagtcagcgtcttgagttcgtcctcggtgaactgatccttcacaaggtcgagggcggcaagcaggtaagcgccgtagttcgattcatcggggatctcgtcgcgcttttcgttcatggcggcgaagagcttctgccacagctcaaggttctcttccatgatggcgttttccttgtcggcgagctcctggatctgggcgtagatctcctcggcggtcgcgccctgcgcatcgccatcgcccttgccgtcgcccttgctgccgcaggcggcgagggaaagcgtcagcgtaaaggcgagcagcagcgtaatgatcttcttaaaattcatggtttattctcctttgttttcttcaatgatcggtttttgagacaatttggaacatgctccgccgctgccgaaggcgtagcggaagcggacggcctccgtcgggcaggcggtcacgcatttgccgcagcggatacattcgctgtggttcggcgttttggtcacatccacgtccatggggcaggtccttgcgcacttgccgcaggagacgcatttgttctcgtcaacgtgcatcgacagcagcgacacgcggttgaagagtgcgtagaacgcgccgagcgggcagagccacttgcagaacgggcggtagaagacgacgctcagcacgacgactgttgcgagcacgcaaagcttccacgagaaaagcttgccgagcgcggcgcggatgctgctgttgacaagcgagagcgggatggcgccttccagaacgccctgcgggcagagatatttgcagaagaacgggtcgcccatgcccgcttcgttcaccacaagcaccggcagcaaaaagaccatcaccaccagaatgacatatttaaggtaggtcagcggctttaagcgcttggtggagaactttttggtcgggatcttgtgcagcagctcctgaaaccagccgaacgggcagaggaagccgcagatgaagcggcccagcagcacgccaagcaggatgaggatgccggtgatgtaataggagaagctgaatttggacgagccgacgacggcttggaacgagccgatgggacacgcgcctgccgcgccggggcaggagtagcagttcagccccggcacgcacacggtcttgcccgcgccgcgatagagcgtacccttgaggaagttcggcaggtgcagattcgtcagcagcgccgcgcaggcctgaaccagtccgcgccagcgggcgagcagaaaggaaaacggttttttcttatccaatgcccacacactccagacatagtttgatcgccttgttcagcacgacgcccatctcgccgcgagatgcgccgtagacgaggaatgccgcgctgagcagcaggagcagtacctgcgccgcggcctttttactcagttgcttacgcaaaaaatcaccctttctgtttgcgctgtggcatagcctacacgagggaagtgaatgcattatgaacgtggtgctaagaaaatcttaagatttttccgagaggaattccacaaggtgaggttccaaaaaatcgaggaacgtccgcgcggcgggggagaggtccggcagcgtcgccgcgccgatctcgacgatctgcggcgggtcgagcggcaggatgcgcacgccgcccgaccaagcgcggccattgagcgcgttgttcatggcgaggccgagaccggcctcgaccatcgagtaggtcgcaagggaatccatcgtggaaaattggagattcggcgtgatgccgcagcgcgcgaaaacgcacgcgttgtcgatgtccttgtcgggataggtctcgatgtacggctctttggcgaacgccgcgaccggcagcgcgggcagccatgccatcggatgcgcagcgggaacccaggccgtcagctcatcgtagccgatggggagccagtcgtgcccaccctcgcgcgcggagatgaagcacagatcgagttggtgcgcgttgagctgtgtgatcagctctgtgctgtacccaccgcgcagctgcacctgaatgccgccgtagcgcgcgtggaaatccgatataatgcgcgcgagcggcgaatagaacgcgctgtatgccgtgccgacggtaaccgtgccgacatccagcccgcgcagctgcgcggagagctgggcgcagctctcgcccgcgtgcagtaggtcgcggatggcgggcagcagcttttcgcactcctttgtcgggcgaacgccgctgtgctcgcgcagcaggagcggaacgcccgtctcctcctcaagcgccgcgaccatgcggctcacgccggagggcgtgtattgcagcgcctccgcggcggcggacagacttccggtctcaatggcgcagacgagcgcgcggtagcgatcgagttccatggcggtctcctttgcgaaattgtcaaagatggtttgatggatcatcggtttacgcaaagtatagcgcgggggtatgctgttgtcaaatccttggaaatgggggaaactatggcacgctcttacgatttgacgagcggcagcatcccgcagcatttgctgcgtctggccgcgccgctcatcatgggcaatattttgcagcagctctacaatacggtggacgcatttatcctcggccgcttcgcgggggagctggagtttgccgccgtcggcgtcgcgggctcggtgatgaaccttttcctctttatgatcacaggcgcgtgcacgggcatttccgtcatcttcgcccagctctacggtgcgggtgagcgcgagcgcttccgccgcgagcactggctctcgctctcgtgcgggctgctggtgacgctcgcgtgcagcggcctcggctttttgctgctctcgccgctgctgtggctcatccagaggccaagcgagctcaagacctttgtctcggtgtatctgacgatcattttggcgagcctgcccgcggcgtttctctacaacctctacggcgcgctgctgcgtgccatcgggcgggcgaacgcggcgctgatggcgctcgccgcggcggtgacggtcagtgtcgcgctcgactactgctttgttgcgcgctttcagttgggcatcacgggcgcggcgtgggagacggcggcgtcgcaggccatttcggcggtgctgtgcatcctctacctgcggcgcaaggcaccggagctcatttttgcccgcgcggactgccgtatggatggagagctattgaagcagacggcgcattttagcttcgtcacggcgctgcaccagtcgagcctgtacatcggaaagctcctggtgcagggcgcggtcaacaccggtggcacggacatgatctcggcctacacggcgacgacgcgcatcgagggctttgccaactcgtttggcgacagcggcagcgctgcgacctccgtgctcgtggcatagaatcggggagcagggaaagaagagcgcgtgaaggaatcgtttcgcagcagcctttttctgatgcttgcgatggggcttgcgatgtcgctcatcatgtacgttagcgcgagcacgtcggtcggctttatgctcgggacgcgcagcggcgcggcatttgagaatgcgcgcgactatctgaagctcgtggcgcttttctacacgctctgcttcaccggcaacacattcgctggctattttaacggcatcggaaaggtgtccgtcccgttcctcggtgcgacgagccacatcgcgctgcgagtcgtcctctcgtggttgctggtcggcaaaatgggcctccccgccgtcgcgctggcaacaggcctcggctgggtgctggtcaacgcgctgtggacctttgtcaaatggaggatggagacaaagcagaaagcagcagaacgtgatattatgtaaacatcaaaagccgcgcgcctaagggcgcgcggcttttgataagttttgtgaggtatcgccgctgatcgaaatgcgcggcaaagggatgacatttttgagaaagcacgaggtttttgcccatatgggaagaccatgtcgaaagagaaaaacttttgtaagagacgcgctctgcttgctgaacttctataaagtgaaaccattttacaattcttcgaaatggtagcgcggcttgccggcgcttttcttgccatattcgatggctcttgtcgggcaatagcagatgcaggccatgcactgtgtgcagttggttccccagacgggacgggcgttttgcagtgtgatgttattcagcgggcagagcttttcgcatttgccgcagccgatgcaggcatcacttgcagtaaagggatttgccttcacaaacagcggatagaaaaccgggttcaccgcgctgctcgcgatgcggtcgtagagttttttgcgcggcggtgagaacatgtgtcctgcgcggatcgcggcgatcgcgcggtcgatgaacggctcggctttggcgacgatccggcgcgcctcctcgacggttggtgcgttgaacatggcgatgaaattctccggcatgacgatctgcgccgtgcccatgtagacgaggcccttttcgcggcagagcgcgcggttgtacttcgcggcgttgccgatctcgctgccgcagtccatgacgaaccacgtttccctcgcgccgcgcagctctgttcgcagcagatggtcgcgcacgatgcgcgggatgcgccaggcgtaggtcggcatgacgaggacgagccgtccgttgacggcgagcggtgttatgtcgcctgatttgatgcggtcattcaggctgatgagcgtatcgttcagcgcgtgtgcgatgcgctcggcgatgtggcggctgttgccggtgccggtgaaatagagtaccatggcgacctcctgtgtctttgctcgagcactgcccgaatattgtattgcctctattgtaccagccgtggcgcgagcagacaagcgctttgtgtaggaaaaccggcgaagtaaagggacttgaacctgagaaaaaaatcaccgcggcttttctttatttaccgaaaggggcgaaagagacatattgcctctcgtatacttgtgtttcctgcattttctgcttgcagaatgggggcggatatggtatcttgaaccatgtgcccgtcggctgttttcgaccggcggttcatattctctaactgaacgaccaccgaaaggcagggctttttcttatgatgatcaacaaacggctcatcggcgcggtgccggagagcaaaaaatatatcgcgggcaacgtcgcgctgcaatggtgctcgctgtgcgcgaacatcgcgatgatgagcgccgtgacggcgctgctcgccgcgctgttcgcgggcagcatgacgcagagtacgctgagcagtcctgcaaccactttatcgccttcaagctgctcgcgctgatccgcgacaaggtcttccgcgcactgcgccgtctctgccccgcgaagctcgaggggcgcgaccgcggcaacctcatctccgtcatcacgtcggacattgagctgctcgaggtcttctacgcgcacacgatctcgcccgcggtcatcgcggcgctgttcacgctcatcatgtgtctgttcatcgggcattatcacgcgttgctcggcctttgggcactcgcggcttacgtctgcgtcggcgtggtcatcccgctcatcacgtcccgccgctcgggcgatacggggatgcgattccgcacggagtcgggcgcgctgtcggccttcgtgctcgacagtctgcgcggcctgaacgagaccatccagtatgattgcggtgctgcccgccgcgccgagatggacgagcggctcgagaggtccatctcgacgggcgtgacatcgaagcctgcctcgttcatcgttttggcgatagcctgcgcattctctaattacttgtcgcctacaacgattttcatacccgcgcccatgcggcgggcgatggccgtgccgatctgtccggcaccggcccataacatgacgtctttcatcgttttcctccttacagcagcgccttgacactctgcgcccaggcgttgatcttgctttccggcgtttccagatggtcgccgccattcgaatcgaatttcacctgcatatcacaggcgaagtccgcgccggggcaggcggccttcatatccttgatgacgcggcccggccagccgccgtttgtcataaacggcacaacggtcttgcctgcaaaattctgtccatgcaggaatgtcttgacggcgggagccatcgtgtaccaccacgtcggcgtgccgacggcgatgacgtcgtagtcggcgacgttgatgggaagcggcttgtgctttggctcaaagcccgcgttcacctcgtgctggccctgatcgaccacatcgttgtagttgccggtatacggcacggcggtgtcgagcctcacaagatcgccgccggcgacgctctgcaacgcttttgcggtgcgctcggtgttgccgcacgaccaggagtagtaaacgatcaggagctttttcattttgcgaactcctcaacccactgggcaagcgcgctcttcgcctcgtccacgtggctgccgtggatggcgaggcccttcgtgaccgccgcgccatgggcagccttgcggatgtcgttttcggtatcggaaaggccgctgccctcgtgcgtgcagaaggggtggatggtcttgcccgtgaagtcgtagtgctcgaggaaggtgtagaccgccatcggcatcgtactgcaatagttggggtagccgaggcaaatttcatcataggcgtcgaggtcatcgggcagatccaacaccgcgggacgggcgtttttctgccagtcctcacgcgcctgcgccacacaggtcttgtagtcgtctgaatagggctcggcctgctcaattttgtacagctcgccgccggtcagatccgcgagcatctcagcaaccttttcggtgttgccgacggaaatgcggcggtacgtgccgccgaagtagttctctcccgcgcgggagtaaaatgcgatcaatgctgccattgtttcgctcctttcttatcgctttgcgccaaaagcggcgcatggtttttgttgataccaccattgtaaaccgccgcgccgcgggtatcaattccggttttgcggctttcctataagaaaaactgatatgaaaaaaggcggagccatcggctccgcctttctgctttcgttcaggtatcaaattgtcctttgagcagccgtgcgaattccggcacgtaggggttcacgttctcctttttccagaacgcgcagtatgtgcgaagaagcggctcaccgtttcgcacgagcggcacacgggtgagcggttcggctgcctgcctttcgccgccctccagcggaagaaatcccctgctgcccgcgaccagaaggcgcgccacctccagattctcggcatacaggaattcgctcggaaaagcgagtacaatgcggctgaattcctgctccgcctcccgctccggcggcggggcgatcagaatgcaggggaaattcttgagctctgccggtgcgaccgccttcatctgcgcgattgggctgtgggcggagacttcaatcagggcgggccgggctgcaaggatcagattttcgtaggcgtcggaaaacaagcggcgctgatcgttgagcgtgatctcgacccgatcctcgctcagcatgtcgcacagctccccatggctgccgtacgcgatggagacgctgacgtcgggatacctcgccgaaaaggctgcgagcgcgcggtggaactctccccctgcataggtgcgcaggtagccaatcttcagattcgccaccttgcccttggcgatcttcgccgcctcggcgcacatgcggtcgcagtccgctgtgagcagcaggctcttacggtaaaagtattcgcccgcaggcgtaagagaaaacgagcggtttctgcgcacgagcagcgcaaagcccagctacgctccaaggactgcacctgctgggagatggctgactgcgagatgaaattttcctccgccacggcggaaaagctcccgagacgcacgacggattgaaagtatttgagctgcttgagcatgatgcacctcctgatgtctaaatgacgatcccctcgcagtggtcgagctcgtgctggatgatctccgccgtccagccggtgaaggtcttgaggcgtgtttggaatttttcgttctgccactggactttgacggtctggaagcgctttgccttgcgcgtgccggtgagggacaggcagccctcctcggtgtcgtaggggccggactttttgacgatgacggggttgaacatgagcatgtattcgccgtcattttcaaaagcgatgatgcgcttgttgacgccgatcatgttcgccgccatgccgacgcagccgtccttgtgggcgattagcgtgtcgagaaggtcctgcgcggtgttgagatcgtccgccgtggcggcttcggccctctgggcgaggaaggtctcgtctttgcagatctcacggatcatggtgttcctcctgcgcggcattctgctgcttgtaatttgtgccccagacgaccatggaatcgaggatgggctttaggctgtagccggtctcggtcagcgtgtattccacgcgcggcggtacctcggcgtagaccttgcgggtgagcaggcccttggcctccatatcgcgcagctgcgcggtcagcaccttctgcgtcacatggccgatggactttttaagttcaccgaagcgcttggtgccgtccatcaggtcgcgcaggatgagcaccttccatttgtcgccgatgagcatgagcgtcgtctcgacggggcaggcgggtaattccatggtatgacctccttcgtgttacagatattgaccggtgatgctgtcggggttcaattgaatttcctccggcgtgccggaggcgacgatcctgccgccggcctcaccgccgccggggcccatgtcgatgagaaagtccgcgttgcggatgacgtcgaggtcgtgctcgatgaccacgaccgttgcgccgttgtccaaaagcgcctggaagacgccgagcagcacgcgaacatccagcggatgcaggccgatcgacggttcatcgaagacgaagacagagtcggtctgcgtgcggccgatctcgctggcgagctttaatcgctgtgcctcgccgccggacagactcggcgtttcctcgccgagcgtcaggtagccgaggccgagctgcttcaaaatgccgagcttctggctgacggtcttccggtccgcgcagaattcaatggcggagttgacgtccgtgtccatgagttcaggaagcgaggcgttttcgcccgccttgttcgtgagcttcacgccataggcggctcttgcgtagcgcgagccgcggcagtcggggcagggaatgttgacgtcgggcagaaactgcacgtcgagacttacaacgcccgtgccgtcgcagccgagacagcggagagagccggtgttgtaggaaaaatcgctcgctttatagccgtgttccttcgcgtcgggcgacttggcgtagagcttgcgcagctcgtcgtggacgcccgcgtaggttgcgaccgtggagcggacgttgatgccgatgggcgtcgcgtcgatgagcttgacatgcgcgatgccgtcggcttcgaccgagcgaatgtgcgcgggaagagcgttgccattgatgtttgcctccagcgcggggacaaggctctcgagcaccattgtcgtcttgccggagccggacacgccggtgacgaccgtgaggcggcctttggggatgtcgacctcaagcggcttgaccgtgtggatctgagaagtagacagatgaaccgtgccgtttgcgaacagttcgtcctttttggcgcgctcgcgcagctttgtttcagccttgccggagaggaacggcccaatctgcgaattcgggttttcttcgatcattgggatgttcccctcggcgatgacatggccgcccttagcgcccgcttcggggcccatttcgacgatccagttggcctctttcaagatctgtgtgtcgtggtcgaccaagatgacggagttgccgtcggcgacgagatcgtgcatcacgccggtaagccccacgatgttcgacggatgcagaccgatcgacggctcgtcgagcacatagaggacgccagtcgtgcggttgcgcacggcgcgggcgagctgcatgcgctgccgctcgccggtggagagagtggaggccgagcggtcgagcgtcaggtagccgaggcccaagtcgatgagccgctttgccgtgctctcaaacgcctcgcagatgctctccgccatcggacgcatctcctcaggaagactttccggtacgccgcgcacccagtcgacaaggtccgagagcgtcattgcgcaggcctcgtcgagcgaaatgccgcgcagcttcggcgcgcgggcggcagaagagagacgcgtgccgtggcagtcggggcaggtttcttccttgaggaatttttcgacgcgcttcatgcccttttcgtccttaaccttggcgagtgcgttttcgacggtatagacggcgttgaagtaggtgaagtccagctcgcccgcctggttggaattcttgttgtggtagaagatctgcttcttctccgcggggccgtggaagacgatgtccttttcgtttttggtcaggtcgcggaacggtacatccgtgcgcacgcccatctggcggcagatgtcggtcatcagcgaccacatcaggctgttccacggcgcgaccgcgccgccgtcgatggtcagggaatcgtctggcacgagcgtgtctaagtcgacggtgcggacgatgcctgtgccgctgcattttgggcaggcaccctgtgagttgaacgccagctcctcggcggacggcgcgtagaaatgcgcgccgcactcgggacagacgagctccttgcccgccgcaacgagcagggaaggtgggacgtagtgcccgttcgggcagcggtggctggctaaacgcgagaacatcagacgcaggctgttgagtagctctgtgcccgtgccgaatgtgctgcggatgccgggcacgccggggcgctggtgcagcgccagcgcggcgggaacatacagaacctcatccacgctcgccttggacgcctgcgtcatgcggcggcgcgtgtaggtggacagcgcttcgaggtagcgacgcgagccctcggcatacagcacgccgagcgccagcgaggattttcctgagccggacacgcccgcgatgccgacgatcttaccgagtgggatgtcgacgtcgatatttttgagattgtggacctttgccccacgaatgagcattttgtcgatcatggtatcactccatcagctgtgaaaaaagtgttgaaaatatacaatagtatccttttggtaactacgccacaatattgtgcttactttacgaaagatctttacagcgctatgataaggccaacgaaagaaaaatgcaacctttcgagtgaaaaattattttggaggtatttaccatggacaagactgctgaccgtaccgtagcgctggacaagggccgcgtggacgtctatactaaaaacggtgtcaccctttacgcctatcagacctgcgatttgatcgacgacgaggtcttcgtgctggcgaagaatggccgcggcgtcgtgatcgagctgccgtgcttttttgacaacatccgcgagctgacggatttcctcaagaacgagggtgtcacggtggaggcgaagtttgtcgcctatcacgccgcgggcgcgtctttcctgccggaggtccccgcctacggcacggcttcctccgtcgcctacaatacgacgggcggcggtgcaggtctggtcgcaaactttaagaacgcgttcggcgacagcttcgatcccgccatctgcgaggtggatcacgtgctggaggagggcgagattgagcttgcgggtatccgctttgtcgtgaagcccaatgccgaggcgtttgaccttgaaattccggagatcaactgcgtttacacgcacatgatgggtcacgcctgccactccattgtggcgggttgcccgcacgcagacggcatcatttcccagctcaactactacatccgcaagggctttgaccttgtcctgaccgcgcattacgcgccggaggatctgaaggatgcacagaccaaggtggactacctgacgaacctcaaggagatcgcgctggagagcgaaagcgccgacgagatgaaggccaaggtgcaggaacagtatcctgattacagcggaatgaactatcttgacatgacggtgggctttttcttcccaaataagtaaaacgccctgagaaaggagcaaaacatgacgcaggcggagcggcggctgtacctgatccggtcgctattgaacgaaaaaacggaataccaaagcctgaacgtgccgcgggacgcgggggagcagcgtaagctgctgcgctcgctgatgaatgtccgcatgccgaaggcgacggacgaagcgtttctgcgcgtgcaggacgagtacttgcagcaagagctgacagacgagggcattaccgacctcgacaatctgcggccagtcagtggtgacctttacctctggcagggggacatcacgcgcctcaagtgcggggccatcgtcaacgccgcgaacagcggcatgacgggctgctacatcccgtgccacgcctgcatcgataactgcatccacacctttgccggcgtgcagctgcgtcaggactgcgccgcgctgatggcagagcaggggcacgaggagccaacagggcaggcgaagatcacgaaggcctacaacctgccgtgcgattacgtcctccacacggtcggcccgatcgtctcgggccgcgtgacaagagaggacgagcggctgcttgcgacatgttaccgatcctgtctggaacttgcggagaaaaacagtgtgcgaagcatcgcgttctgctgcatttcgaccggtgtgttccattttccaaacgagcgcgcggcggagatcgccgtggagaccgtgcggcgctataaggtggagacgggcagtaaaataaaggtgggtttcaatgttttcaaggatctcgacaaaacgatctacgagcggcttctcggcgcaaattgcgtgcctgcggcgcgcgcttgacgaggcggatgctgtcgtcatcggcgcgggcgcagggctgtccaccgcggcgggcttcacgtacaatggtgagcggttcaagcggtatttttcggattttgcggaaaaatacggcttccacgacatgtacagcggtgggttctattcgtttccgtcgcaggaggagttctgggcctattggagccggtatatcttcatcaaccgctatcgaaacgcgccgaaaagcgtgcacgaggttctgctcgagctggtgcgggacaaggactattttgtcatcacgacgaacgtcgaccactgcttccagaaggcgggctttgacaaaaagcatcttttctacacgcagggcgactacggcctgtttcagtgcagtgagccgtgctgtcaggagacgtttgacaacgagaaaaccgtccgcgcgatggtcgaagcgcagggcttcaccgtggcggacggcgtgctgacaccgccgacagatgggacgccaacgatggcggtaccgtcggagctccttccgggctgcccgcactgcggcagaccgatgacgatgaacctgcgctgcgacgacaaatttgccgaggacgagggctggcacgccgcggcggagcggtacgaaaatttcctccgcacgcgggacggacaaaagctcctctttttagagctcggcgtcggctacaacacgccggtcatcatcaaatatccgttcctccgcatgacggcgggcaacccgaaggccacctacgcctgcatcaacatggggcaggcaagcacactgcgcgagatcgaagaacggtcgattttgatcgacggggatatcgccgcggtgatagaagaaatgaagaaaaccgcttcctacaaatagcaggaagcggttttaacttatgatgacagcggatttgtgatttaagtactgcgtgcgattttgggaaaatccggtgacgattgtgatacaattcacgattcggcgaagtcagaattcaatgtgatagtttaattcagtcctgttttcacgttgaacttcactgctgatcgttgcggtaccactacattttagttgctacagaataccgtcgagttttgcagcaactttttctgacatacctgcggaagaactgcattgaaagtggtagtccttgctttgttaattgcggtgaacagacctttcatggtgtcggacctacttgatgtggttttctcagatgtgccgcccataggattatcctccgtatctgcctgattaaaaagatgcgtcgcgttttacagaatcataaaatgctacacttaccaacggatattttaatatattatatcaaattgtgcgcatgcacgcaagcaaaatgaggacacaatagacaaaaactgatatttttaataggcgcaaatagatttgacatggactgtacagtaccctctgttttgttgctttttacgatggaatatgctatcttgattacggtaatttactataaatattaggagagtgaacaccgtgctttttgtttgttaccccaagtgcaccacctgccagaaggcgagaaagtggctggacgagcagaggatcgcctatgagctccgcgacatcaaaacggagaatcctacttatggcgagttgaccgcgtggtacgagcggagcggtctgccgctgaaaaagtttttcaacaccagcggccttctgtataagtccatggaactcaaggacaagctgccccaaatgagcgaggacgagatgctgcgcctccttgccacggacggcatgcttgtcaagcgcccgctgctggtcggcgatgacttcgtcctcgttgggttcaaggaaagcgagtgggcggcgcgggtgaagaacgaatgatggccgctgattggcttttgctttattttgtatggctgccttgaagagcttattccgagcattgaaacgtatatacggatataaagatgtctaaaatcagtcggtttcaaagatcttagggcaagcacatggttcgaacattcgacatcttggtcccaaacttatcgggaatactttttccactcgtttatagcggttttcggcgctttttaatttgttttacttactctttgacgctcttatctccgttgtttccgagtgttccggagccgtatgtggtaatctatgtggtcaaaaacgcttcccgccccaaaccggtgattttttcaccggcccaggacgggaagcgtttctcattgctgttggctgcattgtaactctgaggagggtgttatgcaagtggtttctgcgagaggtgagacagaagttgagttgctatagataagaaaagtgaagctaattttcggagtgattatagaaagcactttcaactactaacttatattcatcatggatcttatctgcagtagctgtaatcataaatccagctttgtacccaaagccacaaaagttatctgtcaggattcttaagcgctccttgtctgatgaaagatcgcagcgcttgtaggctttcttcatttcaatacaaaaaagattatcaaaccctctctgctcgtcatagccccgcttatgtacaattaaatctacaacaatattatgaccgtttaacactttagcggcgtgctcattcccgcggcttccacggttatattctacatctactacatactcgcaaaattcagattctgcaatagcacgttcgagatatgaagcaaacttagcgcaaatacaccgttcgcttaaatctctggatatcaaatactgctcattttgattaaaactttgaagggcggagtttaagcatgctgtgacgctgttttgtgtttctgtcattgctaattacctccatcataggtgttgtaagatttttccatgttaagtgactgatgattaggcgagatattcctgtggagttatatggggcaaaatttgcaccgctatagacaaagaatagcatcacgccttcgccttttgaagatagaactcactctccgcaacccgcgtcacaaaatcatactccagccgtgttgcctttgaaggcgaaatattgtagcgattaaacaccgagcgaaaatatgcaaagaactctctgtcttcctctgtcatcaaggcaacccagccgttctcggcaccatgagattcaatttcctctaacgctgccatacgctctttatccatgtcagttgctcctttcggtgaactttcgcctacactcagcgggaatcgttttggattacctgaattgtaactctaatggtaggggtgtgcaagtggtttctgcaagggtggcagctcagcagttgcggcgctatagacaaagaagaatgagtttacagcatgaaaataatcgcaggcacttttccactatctgagtataaatcccttaattcaggcataatagtaagggatttaagacgcagcccattgactattcccttgttttatattattatttaagggaaagagaaagggggtaagggaatgagaaccttcaattactccgcaatcaaggagcaaaagtgggactcggatgttcttggcctgattgcagccatatacaaggaagctggaaagcaggaattgtatttgaaacagcgcccggaggagctcgaaaagctcgtggagattgccaagatacagagcactgaggcatcgaatgccatcgagggcatcgtcaccacgagtacacgaatccggcagctcgtcgaggagaaaaccactccgcggaaccgggatgagcaggagatcgctggataccgcgatgtgctgagtatcattcatgagagctttgacgcgataccaattacgcagaactatatcctgcagcttcataaaatcctgtacagccacatgaataacccgcttgcgggccgcacaaaaagcgtgcagaattatatcactgcaacctatccggacggtcatgtggaaacgctgttcacgccgcttgccccttatgaaacgccggaagcgcttgacagaatctgcgaggaatacaaccgtgtgattggaaatatggaactggaaccgttgattacaatctcggttttcatccatgactttttgtgcatccaccctttcaatgacgggaacgggagaatgagccggctactcacgacgctgcttctgtaccgaaacggtttttatgttggaaagtacatctcccttgaagctaaaatcgccaaaaacaaggatctgtactacgatgcgcttgcacaggcgcaaaccggctggcacgaaggtgctgaggatgtagtgccattcatcaagtacctgctcggaacgatccttgcggcctataaggactttgaggatcgcgtggcgcttgtagaaaccaagctgtccgcactggaaatggtgcgcagagcaagcaagaatagaatcgggcggttcaataagcaggatatccgggagctttgcccgacgctcagcgacagctccattgagggtgctctgcggaagctggttgcagccggagaattgaaaaaagaaggtcgtgggaagaatacctgctatttcaggctgaattagatatccttcaataaaaataacattttagaagaccgtacctgttcatatgagcaggtacggtctttttgataaaagtagcgaagttagcatcccaataggcagaaaaattgttgtcacacaattgcttttcttggagaaatacaaaacttttagtcgctgttaccatatgactgccgctgcacgatgcaatgtactaagagattgagtgtctcttcagctgttgatcgtttcagttcacattcccaaactacaatcacattccatccgagcttggcgaggagggcgtgatttttagcatcgcgctcaatgttggagcctattttctttttccaaaattccgcattattcttaggccacacaaaatagtgacaaccttcatgcccatgccagaaacaaccgtttacaaagatcacagtcttatatttgggaagaacaatatccggttttcctggaagccgagcgtcattttttctgtatcggaatccttgagaaaacaagtattttctgacaagttcttctggtttagtatcctttccacgaatacgggacatattatagcttctggtttccggagaatggacatcggccataacaatcccccatttcaattagtctttgtagtagtctttcagtttttgacgacatattctcgtaatcgcggctttattggatatgtcaatcgtgctccagatgtccggagaagcaaaaaatacatgcgagtcttcgttataaaagaaaaagccgctctctattaatgcctttacggggttagaaagaagatttgcgattatttgtgcatcggtcacatcgtctctcagatatatacactgtttcttctcaattgccagtccttgtgctttcctatttgaatagtattcacgaaaatagactgcagcattttcaatagaaatacagccatcccggtcaccatagtgaagtagtgccagaattaaaattggtttgtaagaatatgacattctcatagttttacaataatcaagcaaacaggaaagcttttcaacttgactcactgtcggactatagcgagaagacctggtatgttcattttcttttccggaagtagatgttgcccggccaatagcggacgcaatgctttcgatacgatgtattgccgaagaattaccctcgacataaaagtctctgacagcaagctttaacttatctttcaacacgtctatcgagtcttgatgcacaggctcagaagatagctgaataccagcggcttttaatatataatcgtaggcttcttgggacaacgggcgaatagaactttgccaaggaggattgaggctctttcgaactgtttcgaaaccaagttgttcaatatatccaccgtcagggagataaattggaaccttccgttcaaactgttggcaatccagaagtttagcatagtagttttctccatctgtagtctgaatttcgccaacagagcctactccaaaataataccgttgactcttgtcgtatcgattgccttggtaataaatgaaaatatctcctttgtgcagttgatttttatacctggcgggataatggtatgagctgaacagttcatctgtgtaggaagactcactatccaccttttgagacaggataacaagcatacaatcacctcactgatccagtaattcagcaaaaaatccaatggatttgttatccagcgtgccaacgactgtgccgcgatccagcagcctgttgccgcattcgcaacaggtttccggcaacagcgcacagttatggcatgctgccaagttacaggattccggaccttgtccgtaagactgaatgcaaactgggtccgaagaacaccatgcggcattccgtactgcatcacggatcgtatcctctatatgatcctttgcaccttggcgaaccaagccgccgagggaaccttcagaatcaccggaagctgtgtaaataaggacaccgtacataccatacttattttctgctttttcacagtaaattctttcccgaatagaggaactgccatagccacattcaaagctgagctggttgatgatcaggtgggcaaaagtatgaatcaaaacgaattccgggcgaagatctccggtgacatttgcaccaaactttgagttccggtaagaatcctgaaggttacgcagtcgtgccaagacagcaggccgttgcgcccattcttccaccgcttccttgttgaattcaaagaaaataccttcgccatgaacctgaatagctgggagccagttttcactgcccagtctaagcattttctttcgctcagagataggcatctcactgggttccgcacgtgagaatccaacgaaagcacgggtctcctgaagcttatgtacaagggaaatgctcttgaagtatttgctgatgactggatcgtagtaggaaatcggataattctttgaatggaagcgctgtgcatcgccgccactggattttatcagcacattgtactctgcaagccgatactcgtcttcagatatttcttctgtaacatccggtaacccttccaacccctgatcccggcgaataaatgcattgtaaagagcttcccggtcaacatgtttagcatctgccaacatataaataaagcttcggtccaattcgccgttaacccgacgtgcacttactgaatcaaaaaactcatccagtacagcgagaattttctttgttgcctgttcatcatcggttggaatgtaaatggaacttctggtatcagcaaaccatacattcgtagcaccccggagaaccactcgtacatcggcacggccacaaggatgctcttcatcgctgtccataccaagccatggcttagtacctttgcatctgtatccaatcttggataatgctccgggcttagtagcaccagcaatgttttttcttgcaccgcaggtacactcataatacacaccactcagagaagcagatgaaccaccggtacttcttctgattttgcaggtctccggattataccggtatccggggtcctgatgaagccattcagctactgggaaatcatcaatatgaccatccgggcagataacaatgaaacgttccggaatcagtttccttctgtgtcggaacgcaggattacaccttcttccgttaggccatggatagcactcacattcaggttgctgctggtagaatgtagttttttccattgtgccgcagaatgggcaatagtgccatgtagggaatcttaccgtcggaattttcagaaaacagttctgtggatcggcattattctcccgataatcagggggccaacgcagttcctgaacacccagccgtcgaagcagacgctcatcctttattacgaaaggtgtcgcatcattgtagcgccacatatccagaccggcaatcatcagggattcatcgttggggaatggaacgatcgctcccacaccccatggaccaatcagggcacttctgcgcataggtctgttattaaatgccattttttagccctcctttggtacatagcgattggtaagtacttcggcctcgcaggatgcatctacgctgcgcatggaagtgggagtctcaattccccgggagccccatgcttcattgggatggcttcctgcggaatacattaagggaacagggtcagcgtaagaacagtcagggtttctcgcaggctcccatttccggggattccagtcctcccaacactgcagaatatactccattcgatccagtgttgcatccagttcttcactgtcgatatcctctacacggttttcaatgacacagcgtactttatcaatcaaatcatcatcagggaaacggggcggatcctcattgaatctgtcgtcactttccaaccgcatcattccaaccataattgcgtgcaaagcacgctcgcgcaccggagcagagaagggtgtgacgcttgtcggttcaacgttgcaatatacgcgggagtgataggacctgaattgttcatagtgggacttgtcccttggacggccgggccggtacaaaacaaaaacaagaccaggagcattttctgcatcacgtccaacgcggctggttgcctgaatatattcagatgtggttttgggctgtccagccacggtcatcagaccaagtctggatacatccaagccaacggaaatcatgtttgtggcaaggcaaatatcgatgggatgttccttgattttcccttcagaatccacttcgccgggatatcgaattcccagatttgccaggctggcagttacttcgctgccggagatacgactggtaagttcctcatcccgccaaatgtatcgtctgttcttgcggtactcttcttttgttggataccgcttgtcttcgaaccgacgcttatacataacgtccagatgttgatcgatatccgcccgaatccaagtggctgcctgtccaagttcacgaatactgttatagtaacctatattggtccagtagggatcacgatccttttccgagtcaacccgcatcgctttggcaccatacagcaacgatgcaaacaggcggattgcggtagttgcatcggacgaagagcccgtagccaatatgcctacatagcgccgaccattttgattacgtttttcctctgcaaagaaagagtttcctgcatcgaggccagaggggggaaattggaaaacatcatcctggtcacagccgtacagagcgtggcattgttcttttgcacggctgatcgttgctgtggacgcaataatctttggatgaatatcgccggatgctgttcttgtggtacaaagttcgtgaatcagtgtttcatagtggcctaccatggaacccaaagggccagaaatcagatgcaactcgtcctgaataataagatccggagaagtcttctttaccccgttttcataaccgaatattttctgcgcattcgggcggaacggaagcattgcgaacttatccacggtacccagcagcaatgtgggagtctctttataaatagattcatccacaacaaacagcggcagatcctcggtcgagaagtcgcattgatgattacgacaccggaaagcaaaaccaaaccttctccggcccagcggtactttcctgtaaccgggaagttcccactgattcttgcccttttgtacaggccccatttgtgcaccacaccacgggcatttcagcataacaaaaggattgctaccttctccacgatacagcttttcatacgcttttactgcaccgcttactttgttgggagtagtggaaataccaacccacaaaccaatggtaattctgttcttgccgaacaagtcttcatgactctttcggatgaggtcgcaggcgcatatcatagcggatgcacgctcatactgctgtgcagtcaaaaggcgaagtgtataccgcatcagaatagcagtacctttgtcatccttgttcataaggcggcggataaagatggtatatgcagaaagacccagatatgcttcggttttaccgccaccggtgggaaaccagatcagatcgacgattccgcgctcattacagtcacggtcgtacatggcgcgaagattcatcaacacaaatgccagctgaaagggacgccatttgccataaacccgctgttctttgttgtgccaagtactacagggaccgcgttacctatttgcttataagcaagtgttcgcgaaggtcgtccagttacggattcaaaaaagtagttgtctggaaatgtttgaatgcgagcagcttctcttggggtaatagaacgattttgcttaatgtccggatgaataaagtagtgcccatctctcgaaatatgtgccacgacggtctgggcatagggtagatttccagccactactttaaaacgatccaagaaactttttgtgttattatgggtacgtaatcgttcaggaaggtctgtatatgagactctggttttgcttttattccaagtatcgacaacaatgcggtatatctcaagatcttgtgcagtattgggccgtgcttgatgaaatgtcactggctccccatcatactctttaattcttgcgctgaacaggtacttcccagtatagtgagttgttttcaccggagtaataacaccctctccagccttgatggagggaagatcgcaaaataattctccgactttgtgtgcatctttgaccacagggatttgaggataaaaatctgctttttcgccatggaaaccgatcaaaataattctctttctgttttgaagcacaccgtaatctgatgcgttcaatatacgaaagtccgttgcatatccgcatttcttgaataatgcgcgcatgttgtcaaaatgcaaggagccatcctcatctctggcggacagtaagcccaaaacattttcaaatacgaaatattttggctgatattttttcaaaaactctgcatatagcctgtatagataattccgcttatcaccgaccattttgcattcagaccgggatcttccagcaatagagtaagcttggcaaggagggccacctacaatcagatcaagtttttcaccgccaagtagtgagtcaatgtctttaaaaatggcaggtaaagactcctctgatatctcataattaagaactgagtccaatatttccttaggaaccagagcatagaaatctttccggggaatatctccggccaaatatttggtatatggcgcaagattatttccctttttgagccaatgatatgccgtgcgtgttcttaaggtatagcacgcagcagcatccatttccacgtgagcaatcggttcatagccagctctgataaatccttcggacaagccccctgctcccgcaaataaatcaagatatttaggcatggtataatcacctcgttttttattagcgacagggagtcacttatcctctggtataaactccataatgtcctcaatccgacaatccagagcagtgcaaatctttaggagaatctctgttgtcacatgaccgtttttccccatctttgttacggaagcggaactgataccagccttagcacataaatctttcttcttcatgtccttgtcgatcaataatttccagagctttttataactgacagccataaagcttgttcctccgaatcaaagaaaaaatgccccgccaactggcagagcatttttatctgcatttatccgccacggcatatatccaacaccgatggcgttgtatattatcatatcagaaacaatgtagaaattcaagaaaaaatgatgaattcgcatgatttttgccaaagatactcatcattgatattagagggagctttttagtgctaacaaatgctttcgtccatgattgatcttacttttacgacaatcacagattgagaaagaaatggatggcacgtgggtatggctaacttgggagcccacaccacgagtaccccacatccccaaatagcggctgagacgcattgtttcagctgctatttttctaaaaagtttcagtagctgtttccgccgaactgtggtatatgtttgtgctgcaaggaggcgagtgcatgaaatacaagctgctgaaagacctatatgactgcttttataccccatctgaactcccggcgcagaaacaggaaattgagaaatgctaccaagcacttagtgaggtgctcggcaaaccggagcgtcggctggtactccagatcatcgacgcaaaagaccgtattgcggaggatacctccatcgacagctttatcgccggatttgagctggcgtggaagctgtccatagaactgaatcactacgaaaacgagcgctcagtctcctgccgaacggcaatgggattgggagctcgtttcgcatctaagggggaagagaaatgaagaagttcgtcatagcaaccatgattgcagcctgtgttgccctgtgtgccgctgtgtggccacatggcaacgcggtcgaggaaacacccgtcccagccgctgaaaccgctgtgagcgccaaggaagcgaccgttgcggaaattgaggaacgcgcagcactggcagagaaggaaaaaggaacgattccgcgacaagaatcgccccaagaagagcaacctgaaccggagatagggcctattgaaatacccacagcttccgaactccagccttccacggggcagacacctactaaaaatcccgtgccagagcagactccgccccaggcacccaaagaactgcagcccggcgataaagtttatgtggcgggctttggctgggtggagtacgaggggcccaatcattgtgaagacggcgcggatatttacgaaaacggcaacaaaattgggatcatggggtgaaatgtgtagttacccattgcattcgcttcccattcatgttatcatgatagcgctaaattgttggactgtcctgaactttgatcgttcgtagcatgagagtacgaatcatattgaacggcagagacatagacaattttgcagacaaatgagtaaatcctcgaaactatcgattccaatcaaattctcattatggaattgagaaagcagtttgctggttgactgtcgttgtccccctgttgtttcgatgctttgcaccacaaaatcgaaccgaagaaagtgttctttcatcggctttgttttgttgcgtgcaaagcggtcttccggatgatcgcagtccacgcacgaagcaaagtgcgtggacttttttcggctcagaaaggaggccaattatgggaaaggtatcaggaaaaacacataccaaagaacagctggatcactgggcaaatctgcataatcccaataacaaggcatatcgagctgacgctgacaatcgtgccaatcagatgaatccaaaccacagaacgcaccagagaactcacaatgcaaaccgcagaaacaaagcacattggatgcccctgtgggcaccggactatccggaatacgatgattaaaaattagaggtgtacggtatgtcaaagcactttttcgactacgatgacggtgacttcgccatgagcatttctgacagcatggcgatggactccgatgggaatctcatgatgcgcatgggagatcacatggcgatggacatggacaccggggatattcacatgatctcctcgtggtctgatgatgacgaggagtagagcataggcagcagctcaacggttgagccgccatagacaaggaaaacactctcaatccgggcagagaaagcagcgggacaggccgtaaaggcttgtcccgctgcctgcgtgttagggcagatattcttccgtgatccgataccggctgatgccgaaggcgttgctccgctccatgatctccgccgggatcttgggcaggtacttcttgctgaagctggtgtccccgaagtaggcgtcaaagcttgccaccggcaggacgacccattcgcaatcatcctgccggttggcgaggcaatagcggatcagcgtacagacaacctcggatggaatttccttcgggagcgctgttgttactttctctgtcagttcaagcggcagctccggctcctctctgcgcagcggccccagctccaacgcatcggcaaggacatcgtcaaagcgcagcgtccatgcgcctttggtttgggacgcaaaaatcgggatctgatactgcatcaccttacttcgccatgcggcggcaaacttggactgaataacctccgcatacttgagtgaggtgctgcgcaccttttccgggtgcgtcagcatgaagtccgccgcgcggagaacatgacggaggaaccagccgaccccatccgcatccaccagctccgggaactctgtatgcagctccgaaaaatccgtctggaactgccactccttgtcctgcacacgctttccgtcctctggcacactgcaccaggcgcagagcgcacggcgggcatggtcgacccggtcatgcggatcacccgaaatgactgctccatctttgctgtggaacaggtatccgcgagccagaacagtcaaaatccgcgccatcccctcaaactccaggatcgtggcaaatgtgaaccggcccagccatgtcgtatcgctcttcttgctggcggtataggaaaccgttctggtatatgcgcagaattctacccattcgttaatcatcccgcacctccagaacatttttctcgatatactccggcagcagctcccacagcaggtcgcgtctgccgagggccaccacatagcgcacggccagagccggtcttacaatcgcggtcagcagctcccggcacttggccgtcaccgcgtcacggtagctccgggaggcggacttgtccgcgaaggctctcatcatggcggtgaaggcttccgagtcgctttcacggaacagctgctttttctccctgccggtgttctcgtcctccatatcacagacaatgtctcccaggatgcggtagccaccgaagcggaaatcggtcagcagatcgtaaatatcctcaaactccggctccgtcagccattcccgcaggaagcactcccgtgcatcctcgtccatgaggtgccatgcttgctcccgcatggcatacagcagggcggacaccttttccggcggcaggctgccgaacagagcatacagctcgtcaggatcgtatgcatcctcctgccctctggcatacagaatgcgctccacatcgctcttccgctttttctccttcaccggaacgcggcaggcccggatgcgggagagacaggcgccgtaatcccgcagcagcgcgtccaccgccgccagcttatcggaattcagatgctccttccagtccggctgccgggcaaaggaaaacagttcctcgtccctggcgggcttcgttttgatgcgcggtgtgttctttttcagctgctgtgccagatacggcaggcgctccacgttggagtccaccttgctccaatccaccttcttgaaaaacgccttcaccttggccgcatgggtaggctcataccaggcacgccgggtctccatttcttctaccaacgttttatatttgagaaagtcgctgcgcctgacggtcttatggatcaggtactcatccagatccgggcggatgccgctcttggccgagtcgatctccagcccggtgaggatggccaatgtctccgtctcctcccggcagcgctcacgctcctcgacgtcggagttttcgttgtaggcaatgatgctgcggtccagcgcggcgttgcagatctggccgacgcgggaggagaaggtactgcgaaccgtttcaaagcgggcctcccagtcgtcggcattgcggatctgtggctgggccgtggggatcatcagcagcggcaggttgtgtgatctggaaaatacgctccgcggccgcggaggatcgtgatagatgtttcgcttcacgcattcgttcaaaatgggatcgctgatcgtcttgatcatatcgccgtcgtagtcggcaccgcccaaacgctccgcggcgagtgaagtgtagccaaccataacaacatccgtcagatggccgagatactgatcgcgtagatttttactgtcttcaagaggataaagctgcatttcttcattccgggcaatgtgtggattgcgcagcagcgtgcagacatgaccggactggtaagccgcgcccggagcaaagaaattctgatggttcaactccagcccccagcgaaaattgataaaggtattcgtttttttacttgttccggttttcgtaacaggcaggcagttcagaaaatccagcagatctccggaaagataacggttgtctcctgctacgatcagccggccgacggcgtactgctctgcgattttatcggcttcggcctccagccgcttggcataaatcggttcgttgatgaaacgaggattctttttcagcacggcggcaaggatctggtctttgccctgatgccgttcccaccagctgacccgctcaaacttctccagaaaataattctgccgaaacgattcgtcggcacagaagctgtaatacgccagttccgtctgcttggtgagccaatttcgctcgtccgtctccgggctgtgatcccagccgtccggcagatcggcggggcggaactcgtccgccttgagtgacactgtgttcaaaaactgatagttcagttctgtcgttttctccggcttttccttgctgacattcgtgatgtacagcgcatggcggtacttgcggaacaccgcccagtagtcctcccagctcatgccgcttccgttcagccagccgtagcccttgaacatacttttggtgaggatgatatcgaccttctggatcggatgctccacgccccacagatcggtgatggtgtccgtcccgcagagggtcaggaagtctttgaagtccacctcgtgcagcatacccttgacatagggcatacgaatttgaaatgaggtgtggactttctttccgcacagcttctcgtcaataaggcgggcatattgtttggagatcaggccctcgccgtcgaagcaggtgacctcgacatcggccatcgtttccacccggtgatatttgcgggtgctgttctgcgtcccgtcgtcctccacagtgatcacctctgtgggtgggggcgttcgtaccggattgtcaacgaccactacccggtggggctggtcaatgccgatgccgtcaatgcggataccgctggacagcatcagaccgttgtaggcgtagagcttgctgagctggcagtcaccgatggtcatatccatcatgatgcggcggcgcacggcatcataaaaatcctcccggatgaaggacagccgtgcctgtcggctcatgctgcccgaacgctcaaaggcgaggtagcgatgcgggccggggccaaaatccaggctcacgccctcggggcggaacagggacttggtcttcttctgccggatcaggtttttctttctggcaccgctccggtcaaagatgccggagaagtccatatagaaaatgatgtccgagaggtcagtcaccagctgcctgccgggaactccggtgaaggcgtcgccgtgcagcacgcacatgatctgatagaacagcgcgttatcgtcctgctcgtgaggtgcggaaagtgatttgcatttctctgtctcagcggcgctgagatggaaagtatatgcaccgtcctgctgccttccatagctgatcacggctctggcggacagctcgtagattctatatttcaccaatggcatcggctcacctcctgatgcttctattctatcatgaggttctaaatttgcaatatggatactgctcccactttttcagtgggagctttttgcttgcagctctcaacaaaaaattacaaaggaggaattcaatgcaagaatccacattcaccaactatgaccagctgccgctgttcctcaatgcgaacgcggtggcgcaggtgctgggcgtgtccatctccagcgcctatgagctcatgcacgaaacgggcttcccagccctgcggatcggaaaccgcatcgtggtacccaaagaaaaattccgtcggtgggtcgatgcgcagacaggaggtgatgcctgatgttccagcgctggcctaagcgggatccgaacaagcactactatctcgtcccaaacgaagtcttcaatctcggtctcacttctcacgagatcgccgtctacaattaccttctccgctgcgaggaccgcaggacctaccagtgtcatcccagctaccgcaccatcggtcgggcggtgcggttgagcgaaaacactgtgcggaagtatgtgaccggtttggaggagaagggactcatccgcaccgagcccagcaccatcatcacgaaggacggccgcgtgcgcaacggaagtctcatctacaccatccgccccattcaggaagcgctggagctgaactatcagcggcagttcctgcgggcggagcgtgacatggagcgggcaaaggcagagaaacggctggccgaattgagtcggcaaaacaagaaggaggaaagcgcatgatgcagcagcttgcaaactttatcgtagaccatgacccactgatggtcctacggcgcacacacgacacggtgcgttacattcggtgggtgtggaacaaggatcatgccgaccccattgatgaagaagaacttcgcctgttcctctgcgatgaacattacggtgatctgaccgatgagcaaaagaccgttgcccgtcggtgccgggacgggatgcgaagtgtctatgcggagctgtgcgtgcgcttgctgcaaagtgagatcatgctggagcagggcatggtgccggacagcagcacctactgcagtgtgttctgcccggaagggggtgatgcgccgtggatgattgaccgggcaggataaccgaaaatcagaccgatttgccgccgacgaaagaaaagcaggagaaagccccgacgcctattcgcgccggggcacccccacaaatgcccgcagtgcgggcattttcaagggtttgtgaccggggacaatgcgacgctctttccgggctcatggacccactctgacgctgaaaatccgaaaaagtcagtgtttgcaagggcttctaccgacgtcataccggccccaatccccattttaccccgatttcaggccaatttgcggttaaagttgatagaagaatacagtagctatttccgcaaaagtgtggtagttgtttgtgttgcaaaaagaaaatgaattcaaaggaagtgaaatacatggcaaaacgaagaccggccggtgacggcatggtgcgaaagcgtgatgacggacgctgggaaggccgcatcgttatcggccacaaggaaaacggcgagccgctgttccggcatgtgtatgccaagacccaaaaggcactgctggacaagctccaccagaacatcgagtgctaccgcgatgtggagctgaccgaggacagtcggatgacgctgggccagtggctggatcgctggctcacggagtacaaggcgggtacggtgcggcccggtaccctcgagggctaccgccgctacatcgaatactacatcaagccgcagctgggcgacaagcagatctcccttctctcccagcaggacatccagcggatgtaccgccgtctgaaaacggaggggcgcatccacgaacatcccgagatgaaccatcagctttccgactccatggttcgccacatccattccacgctccacgccgcgctgaaagatgcggtgcaggcgcatgtcattcccagaaaccctaccgaggggacaacggctcccaagcccaactacaaacccaagcgcatcctcacccgtgcggagctggacgcctttctcgcagtggtggagcaggacgaggtgtggcgagacttcttccaaacggaactgatgaccggcctgcgccgcggcgagatctgcggtctgcaatggagcgacttcgatggggacaccgggacgctgaaggtgtgccgcaccctccacagccagcggaagggcgagtacaccgttggtgagacaaagaccaatcaaggtatgcgcactattattctgccgcacagcgtgactgaaatcctgcggcggcgcaaagagaatgccatcagtcaatggatattccctgacccggtgaagccggaggatcccgccgatcccaatgcggcgtatcgccacatgaaaacgctcctccagcgggcggggctgcccagcatccgcttccacgatctgcgccacaccttcgccacccatgcccttaccagcggcgtggacgccaagacactgtccggaattctgggacacaccaatgcgtccttcacgctggacacctatacccatgtcacatcggatatgcagaagacagcctctggcatcgtgggcggcttcatggaggacatcttcggaaaggagttgaaaccgtggcaagaaagcgaaaagccggagacggaaccgtaagacagcgcaaagatgggcgctgggaggggcgcatcgtcatcggctatgacgataacggctatcccaagacgaaaaatgtcctcgccaaaaccaagaaggagtgccttgaaaaactccaaaatctcaaggaggaatgcggtggacggaagccggagaaggtgcggtcagagatgcccttcggggtctggctgacatattggtacgaaaatcattccaagcccaaaattcgccccaccacgcaggagacctacgaaagccgcatccgtctgcacatcatcccggagattggggacattccactgaacaagctgacgcagaatgacttgcagcagttctatggccgactcaagaaaagcggccggaagcgcttcaccgacaagtacggcgaagggctgtccgaccgaatggtgcgtatgtgtcacgccacctgccgctccgcattggagaaggcggtgcaggatgggctgatccgtatgaacccggccatcggctgcaagctgccgccgaaaaaggctcgggagatgcaggtgctgacgcgggaggaactgcagcggtttctcatccaggcaaagttcgagggttactacgaagtctttcttctggacttggccaccggcctgcgccgaggcgagctcatggcgctgcaatgggacgacctgaactttaaaaccggcgtgctgaatgtgaacaagcaggtctacgatgtgcggggccagcttcaaatcagcacgcccaagacgaagaactctgtccgcaaaatcgtcctgccgcccgccgtggtggcggtgttgcgggagtacaaaaagacggtggactcccgctggatgttcccgtccccagtgaaggaggactgccccatcacccctggcgtggtgcgccgcagactacagctcatcttggaacacgcagggtgcaagcatgtgcgcttccatgacttgcgccataccttcgcaacgctggcgctggagaacggcatggatgtcaagaccctctctgccatgctggggcatgtgtcagcagctaccacgctggatatctatactcacatcaccgacgatatgcaacgcacggccgccgccaacatcgaccgcggcatcggcaaagcagcgccgcaggaggacgcttcagagccggggcaggaaactgccccggcccaggcggaaaagccgagtatgaccgacttcaagccctatgcgggccgcaagcgcaagtcaggcaccggttgcgtcagccagatcaacgaccacctgtttgaaggccgctattctcctaaatggcccgatggcaaaaagcacgcccgcaatgtctatgcccatacccgcgaggagtgcgaggagaagctgaaggtgttgattgaggagacgaaagccgaactggtagagctgaagcggcaaaaagcggagggggctcttcctccacaggagctggagaagggtaagaagagaggtgggaaggtaaggaaagcgagcaaataacagtagacaccgagcgaggtaccaaatgatcggtacctcattcggtgcttattgtttcatggtaaaacaatagggaatcactgtttttgttattgcggtgaaatgcggacacaaaacgaggagttgacttattgtgtgaattgaatataattatagtggggtggtttaatgaacttgctacatgtgttcgcaaccaatcttaagtgctatcgtaacgaaaaaggtttatcacaaagagagtttgcggatttagcaggattgcatcgtacatatattagtgccgttgaacgagaacgccgaagcattgccctttataatattgaaaagatagcttctgcactaaacatagaggcgtacttattgtttgttgatcatgaaagtgattcataaggaggtgaattcatatgccgatcgctgcattggatttgttttgtggtatagggggactgacgcatggacttcaattatcaggtattcctgttattgccggatttgacatagatgactcttgcagatatgcatatgaagctaataatgcctctgaattcgtcgttgcagatgttgccaacctccaaggacaagatcttttggattactacccggttaatacaacaaagatcctcgtaggttgtgcaccttgtcagccattttccaaatatacccaaaggtatcgaaaagaaggtcacaccgggaataaatggagattgttggattcgtttgcaagactggtacatgagcttcatcctgagatggtatctatggaaaacgtccctgaactatcagggcaatctgttttccatgattttgttcgtgcattggaagcagaacattaccatgtcgcatgggaggtagtatattgccctgattatggtgtatctcagggtagaaaacgacttgttttattagcttcgcgtttgggagaaatacgattgatcccaccaatttttcgaccagacaattatcttacagtacgagatgtaataggaaatcttcctcctattttagcaggacaggcagatgacaatgatccactccattgtgcatcgcaattatctgccataaatctggtgcgcatagcacattctgtgcctggagggacttggcgagattggccggaagatcttcaacttgaatgtcacaaaaagaactctggcagtacatatccgtctgtatatggacggatgtcatgggacgaacctgcgccaacaattacgactcagttttatgggtacggtaatggccgattcggtcatcctgagcaagatcgtgcattgtctattcgagaaggcgcaatgttacaatcgtttcctgcagactatgacttcgttgctccgaacgaaagaattagtaagcgtgagctcggtattcatattggaaatgctgttcctgttaatcttggggttgcgataggactaagtcttcaaaaccatgcacgggaggtcggaattgatgtctaagcgtaaatatattactgaggatcagcggttaaccgctgatgcacaaattaaatctttgcaacgacagattaactatgataccaaagattacacagtagagcttgtggttcaaaaatttaaaaaagatgagtttttcattccggattaccaaagagggtttgtttggaaagaaaagaataagtcttcgttcattgagtctgttttgcttgggctgcccattccgttcatgttttttgccgactgtgaagatggaaagttggagattattgacggagctcaaagggtgcaaactttggtggcttttgtgactggtaagcttgtcctgtctcaattaccaaagctaagcgctctgcatggatttagatttgacgatctatcggaggcgcaaaagaggcgcttttggaataggccccttcgtattgtagtattggaagaatcaacgcctaaagatgttcgccaagatatttttaatcgaattaatacctcgggaataaaagctaaagaatctgaaattcgccggggctcttatcccggtcgtttgacagactatattgatgcatgttctgcgaatgagcgatttgttaaactatgtccagttactgatgcccaagaaatacggagggagcgcttcgagctattattgcgcttctttgcctattcgaattgttatttggaatttgaccacgcagtaaaagatttcttagatgaattcttgatcaagaatcaagatacctttgatgaggctgcatacacttctgagtttaccgcagttttgacctttgtagaaaataacttcccctttggttttgcaaagacgaagacctccaaaataacgccaagagtacgatttgaagcgctctcagtcggggttgcacttgctttgcgccaaaatcccactttgacggtttcgaacgtcgattggatgaaatcggatgaattcagacgcttaacaacatcagatgccagcaataaccaaggaaagcttaaagagcgtgttgaatatgttcgcgatcagctattaaaggatgcgttacccaatgaataacacattcattctatttgaagatagaaaggcagaaatagagttctactactctatcatgctggacattgaaaacaatacaggaaaaattcaaactattgataactcaaaatttttccgtatcttaaagtccaattttctgcttatgctttacaatttggtagaagcttgtgtcgtaagtgggatgttggaaatctatgagagtcttaagcaaagccaaagtgggtacaatgaactgattgaagagatccaaagcctgtggtcgaaatataaaatcggtgagatctacaaaagcttgggaactcgatcttcttacgaaaaaggcgtacgagaaattattgcacaggttattacagatgaaccggtgtttctgaatcgagcggctcttgagattagtggaaacttagatgcgcggaggataaaaaatctctgtgataaacattgtatccgttatgttgcttctgatgacgatggatgccttaaaacggttaaagagaaacggcaaaatcttgcccacggagacgaatcctttggagattgtgcccgcgacatgacgcttagccagttagaacatattaaggatgaagttatccggtttattggttcgattttaaacggtatgaaaaactattacgataataaactctatcttagagagcccgaaaagaaaaagaagaaagcaagcaaatgttgactctgtaagcaaaatgaggaaaaccgtaaaatcgccgatgtagttgcgggagaatttctgccacatcggcgattatacattacctgaggatttgatttaggagaaacttatggtcaagggttttattcactataaagacgccagaattccttttgttatacaggattatagaatggatttgtttaccgacgattctattcttaatgcgtttatagaggaatacaatttccggactgactatgtattaactggagagtgttttgattcgggctccatttctcgaaaaataattttaaatgttgagagaacaatgggtagtacctgttatctaaactgcttcctaattaatcaaatcggttacgatagccggtttgattccgtcacgttcaaatctgacttgctggattgtattttccgatataaacatcgcttgacaagggcacacagagaaaaacaactgaaaatgagctgccaagccttacacaatgcaccgcctaacaggacataggcggtgtttttgtatgcagacagcgttttctctgtgtgctgatatgggccagccgtgcggcgtggcctaaattcttgtcaaggaggttattcgtgtcatggcagaagaaaacaagcatccccctaccacggaggaacagaccccgcctgaaatgccgggaaaagccccggaaaaggagcaggccgagatccctgatgtgggcaccggccccgctccgtccgcaaaggtgatcgacctttccgctgtgcgttccacgccggaaaaggatgctccgacggacatccccaaggagccggaagcccagcctgtttccgtcaccgagtacagcaagcaggaatggaaaaagcccatgccggagccggagaaaaccaagcccaaacggggccgccccgcaaaatccgaaaaagctgcgcctaccgagccgggggccaagaaagaggcacaggtggaaaagccccgccgtggccgcccgtccaaggcggaaaaagtggccccggagcagaccaagccgcccaaggctggcaaaacccatgcagcccccgaggaaaaggcagcacctccggccccggaagtgccgcctacaccccgcgacgctacccgcgccgaaaaagaggaaatcgtctatcttgacctttccgacctgcaccctttcaaggatcatcctttcggtgtccgtgacgatgcggaaatgaaatctctggtggagagtgtccgcaacggcggcgtcaaccagcccgcgctggtgcgcccccgtgagggcggcggttatgagatcatcgcgggccaccgccgccagatggccagccagcttgccgggtatcgcaatatgccctgtatcgtccgcaatatgacggatgacgaggccattctcgctatgacggatgacaacctccgtcagcgtgaaacgattttacccagcgaaaaggctatgtccctgaaaatgcagtatgaggccatcaagcatcagggggcgcgcggcgacagcgccgaggccggaaagctctctcttgaaagcgtgggccagcgcaacggcatgagtgtgaaaaccgttcagcggtatatctggctcaatgatcttgtgccggaactgaagcagacgatggatgatggaaagctgtcttttaccccggctgtggaaatttcccgtgtgcggcccaagcaccagaagtatatcgccgtgtccattgaaggccagcaggcttcgccctccaagggtcaggcaaagcggctccgtgagctggacaaggaaaacaagctctccccggacgtgatcgacggtattttgtgtgaagaaaagaaaaaggaggatcgtgacgtgattattactggcgctgaactggaaaagttttttggtaaggaggccacgccccggcagatgaaagaccagatcatgacgctgctggaggactggaaagagcggcagccgcccgagcttgccaagcccgacaagaaaatggatatggaaaagtaacgacctctggccaccatgaccagaggctttttgctgccccgataggacaggctctttgggttataatcccccgtcgccgcccgtaatcgagcacaggcgggagtgggctgtcaagggggcttcgccccgccgtgtgcggcggccttgcccttgaccgcctgccccggctgtgctttttctccggcaagcggcgggggtatatcctccagagccgcccccttttccaagattggaaaagggcgggggaaaaaggttgacccactacattataaaaatggaggttttcaaaatgaaacgaccccttgcgtatatcaccgccgcgtggagcggcgatccctgcgaggcgacggagcaggccgccaagtattgccgtgctgtctatgaggcgggcttttcgcccatctgccccacgctctatcagccgcttttcctgaacgacgccgttcccgaggagcataagagcggcatcgacatggggcgcgacctgctccgccgctctcatgtgctggtggtgtgcggtcataccgtcaccgaggccatgaagaacgacatcgccgttgcccagcggctcgggatcaccgccaccacccttgagggcattttgaccgtcaagggacaggggcgcagataagatgacggcactccggctggggagcctgtttgacgggatcggcgtgttcccactggcggcggtgcgctgcggcattgagccaatatgggcaagcgagattgaaaaagcccctatctccatcacgaaacgccactttcccaatatggcacacttgggggatgtggcaaagctggacgggcgggagatcccgcccgtccatatcatcacctttggctcaccgtgtcaaaatctctcgcagatcggcaaccgtaaggggcttgcgggagaaaagtccagtctgttttttcaagccatccgcattatccgtgaaatgagggaggcgacaaatggtctatttccagcaatcgctgtttgggaaaatgtcatgggagcgttttcatcaaatgacaggatggattttagagccgtcctatccgctttcacagacaccgatgtttcaatgcctgcttctggaagatgggcaggagccggaatggtgcgagggcgaacgcctgacctctgctggcggctcatggacgcccagcattgggcaagcccccggctggcacgacggcagcgcgtctttgttgtggcagactttggaggacaatgttcccacgaaatactttttaagccccgcgcagtgcagtcaatttctgcgtctggcggagattgctggctgtccgccgcctgcggagatcgaggctcttttattgaagcagggcggcgcgtaccagtcacccgaccctttcaatgcttccgtatgcgggcgtccgccaaggagcggacggaaacagcgttccgaaacagcttcggactgccaactgacccttttcccactctgttagcgggcggcatttcgccctttgccttttggtatgaggacgatcccgccgggggctgcgtccgctttcccacggaaacggaatgtgagcggctcatggggctaccggagggctggacaaagtacggcgcggacggtgaggaaatcctatcctcccaccgctaccgggcgctgggaaatgctatcgcgctgccctgcgccgagtacattatgcgcggcatatatgatgttctgacaaggaggtgctgaaaatatcatccctgtttgaagcctatattaccaacctcggcaaatacaacgaggggcggcttgtgggcgaaacgctgaaattcccggccaccacggaggaggtgcaggcccttttgaagtgcatcggcgtggatggggtacggtatgaggaaatcttcattacctcattcgacggtgatgtgctgggcctgtatgaccatttgggcgagtatgaaagtattgacgagctgaaccatctggcccatgtgctgtctgacctcgaccagagcgacattgaaaagtttgaggccgtcattgacagcggcgaatacacaggcagcgtccatgacctgatcaacctcgcgcaaaatctggattgctatgacttctaccccggtatcgacagcgaggaggcgctgggccgggcctacatcgaggaaatggaaatgctggatgtgccagataatgtgctgccctacttcgactttgaagcctacgggcgggacgtgcggatcaacgagggcggccattttgcccccggcggctatgtgttcaataatggcggcagctttgtggagcggtatcacgggatggaggatattcccccggagcaccgtatcttcgcctatcccaagctgaatatccgggagcagatggcggcgtatcaggaggtcatagaccgttcggctctgaacgaggaaaaacagcggctccccgccagccgcaaagaaagataggccgcttctggtcacggtggccagagggtaaaggaggtgtaagctatcgtcggagatgaagtgtcccggcagaccatcgccgtcagcgtcaaggcatccaagctgaccgcccgtgcgctggcctatgtggtggcagccgtgggccggaagatcgccaaggagcaccgcaaggcgcagacaccccacggcaaacagagtgtgcgaaagctcatgggccacggtggggacaccaacgccattgaagtggacacgcctaagctgtttgacaaggtggcccggaaatggggcgtggactatgccatccgccgcgtgggggatgaaaaatatctgcttttgttcaaggcacggcaggccgacgccatcacaggctgctttgccgagtattcccgtttggagctgaaacgggccaagtcccggcagacaccgatccgggagcagctccggcgggcagaggaacaggtgaaaaagcagccccagcgggaattgacaaaggaggcagcgcatggcgacagataaaatcaggaaatacctgctcctcaacctcccgtacttgtttatcctgtgggcctgcctgaaaatggggacgacctaccgactggcggctggggccgatttcgcccataagctcatggggctgggccaggccatcggcccggcctttgcggatttcgcgccggggcttgccccctttgactggctggtgggcatcgcgggggccgtgggctttcgtctgctgatctactgcaaggcgaaaaaggccaaaaagttccggcacgatgcggagtacgggacggcgaggtttggaacggaaaaggacatcaagccctttgtcgatcccaagtttgaaaacaatatgctgctgaccgccacggaacggctcaccatgaacacccgccccaaaaatcccgccaacgcccgcaacctcaatttctgcgggatcggttcgtccggctccggcaagacccgcttttggctcacaccccagcttttgcaggcccattcctcctatgtggtggtagaccccaagggcggtgtgctggggcaggtcggggcctttctccagcgccggggctatcagatcaaggtgttcaacagcatagatttttccaagtccatgcactacaaccctttatcatatatccgcaacgaggccgacatcctgaaattcgtgaacgccctgatcaccaacaccaagggcgagggcaaggagggcgatccgttctggacgaaagcggaaacgcttctgtactgcgccctgattgcctatatcatttttgaggggcctgccgaggatcggaatatgaatacgttggtggacatgatctccggcatggaggtcaaggaggatgacgaaaactataaaaacgccgtggactatatgtttgacggccttgccaaacgcaaaccggattgcttcgccgtgaagcaataccgcaaattcaagctaagcagcggcaagacggccaaaagtatcctcatttcctgcggcgcacgtctggccccctttgacatcccccagcttcgggagatcatgtcctatgacgaactggagcttgaccgcatgggagatcggcggacagccacattcttctgcatcagcgacacagacagcacctacaatttccttgtggcgctggccttttcgcagatgttcaaccttttgtgtgaacgggcggacaatgttcacggtgggcggctgccccatcatgtgcgggtactgtgggacgaggcggccaacacgggacaggtgccccagcttgaaaagctggtagccgtcatccgctcccgtgagatcagcctgtgcctgctgtaccagcagttggcgcagtgcaaggccatctacgacaagaacgcagaaaccatcctcggcaacatggatagtgtgctgttcctcggcgggcgcgaaagctccaccatcaaggagatttcggagaactggctgggcaaggccaccatctccatgcagaccgagggacgctcacggggccagtccgaaagctacagccagaatacccagcggctgggccgggagctgatgaccccaagcgagcttgccaccatgcccggagatcggtgtatcttgcagcttcggggcctgccgccgttctactccaagaagtacgatttgaagcagcatcccaactacaaatacaccgccgaggctgacaaggtgaaaaacgcttttgacctcaacagccttgtgacacggcggatggacaagctcaaccccaacgaaacctataccgtttacaaggtggacgtgccggatgaggcgctcacaggcgaggacgaggacatcctcaactatgacgacctcgatgacccggacgcctttgtataacctctggtcacagtggccagagggagtagctgccgccagaaatggcggcttttttcatggccgggaacatcccggagaaatggaggacttatgcagttttttgcttctgccgttactaccctgcaaactctcgtcgtggcgctgggcgctggccttgccgtgtggggcgtggtcaatctgctggagggctacggctcggataacgcagcggccaaaagccagggcatcaagcagttcatggctaattaaagggagcaaaaagaaaggaaaagcacaatccagacggtatcagcggcaggttacaagaataaattgtgatttcacaagattggtgctataataagagaaaagttcctgccggggcagccgccccggtggtatggataggaaggcgggaaagcaatatgcacatcagctataaaccactctggcatacactgttagagcgtgatatgagaaaagaagatttaaggcttgctgctggtatgacaacgaatatgattgccaacatgagcaaagagggaaagcacatcagcatggacacattagcccgtatctgcgaaacgctgaattgtgagattaccgatgtaattgagttagtaccagacgagcctgcttccacaggaggtaaggaacatgagcgaattgaaaccaagaataacagaaaacggaattgattatatccttgttggagattactacatcccagacttgaagctgccggaagaacaccgccccatcggaaagtacggacggatgcaccgggaatatttaagagaagtccacccagccagattgaacacattgaccttgaccggggagttatggacataccttgcagacctgaacgaacaggcacaggaacggttagacaccatcatggagcagatgaaagccaccgagggcgtgaccgaggaattgaagcgtacccgtcaaatggaatgggtgcagcgttgcaataacattcacaaccgagcagaagaaattgttttgcatgatataatttattcatacgggagtaattaaatcggaggtatataagatgattgaaattgtatttggtgaaagtgcctgtggaagtttgaaaattgcccaaacttacggtaagggaaagtatagaggaagtgcagtttcggtctttatgaggcacgaagatgggagtgttccatcttcagatgaaatgaaagaagcacaaattcaagcacaggaacaagaacatattgcttgggagaatgctattccattgggaggcaagagcagtgatgtttattgttttgatatggctcttagtgtgggagatatttctgataatggaattggcgaacagcggaaaaatgttctcaagaaaatgctgtctgtctggtttgtagaggatttagactatcaggttgaagaaaaaatacagaaaattaaaactacattgtcttcggttattgaacgatatgtagctggggaagaagttcgtatttggtatagctataatccggatgaactttgcggtatgtactggcttatgaaacaacttcgaccattaaactgtcagacaacaatttatttggttaagttacctgcctgggaatatggaaaagaaaatactatgacatccaaaatagcatggggtgaggtttctcctggcgaatggggaaaatatataactctacaagaaaaagctaagcctgtatttctttcagcttgtgctatgaaatggaatcaacttcaaaatgaaaatgcacctttgcgtgcaatgctaaatggtaaattgcaaagtgtttcagaagatatatatgatagtttcattcttcgtgaaattgcggaacagccagagcaattcaaaatggctattgttataggtaatgttttaggaaaatatcaacttggaattagtgatgtatggatttctaatcgcattgataaaatgcttgaagatggtgtgttggaaattatacaggacgcaccaaagggagaaacaaattatcgccggatattaagaaaacgaatgaaataataaccacagcaagaaccgctgctacatggaaggcaccccaaccatgcaacagcggttttttttaccgttttttcctctggctgataggcgttcccattttctttgattttttgagaatccgaatgagccagcgaaattcttcatctgacagatttttatagttgataccaagttgcttgcagtaaaggacaaccagcttttcatcccggctgcccttgaaattttcgaccgcttccagattttctttcagttcatcggcaacggtggtctggggtgcactctcactgtcctttttgtgggcttcccgaatatcccggataatgaggttgaggtcatccagaaccatgtgactaaaatactcatcatcgctgatatgggcggcttgcagcactttcaaatgcgggtcatcttcgccggggcgataccgttcaatgatttcatgccggacggtatcgacaagtgcattgagattttgaatctgcatggtggcaatcccgtccacataaatctcaatgtctgcaagaaacttgataaaatctttatgtgtggcaagctcacagagcagacggttgttaatccgactgcttttcagaagtgctaccatctcatcattcaaatgcagctccgtcaatgacgtgttgatctgctccctgttctctgtccggcacagtagataatcaacggaaaccccatagaagtctgccagcgtgataaggttgccatgattgatttccttaaaatcctctttttcataacttccgagagcagatttggaaatacccgtcagctttgatagttcttccagatttaagcctttgtccttgcggagttcccaaaggcgttcctgtatgcttgttgctcctttcatgggcgcacactcctttccggcggtttcattgctgccgcttaactggattatatcacactttccgcaatcgtggaaatttctgatttttactcctaattcctactttgtggacatacggcacagggcacaaaaatgttctatgatacaggtagttcatcgatggattattccaatcgaatgaccagcctgtgtgggatatgcttccccggcgatgtagtgccatgacttttggcagggatatggaggaacccttaccaaaacgagcataccaaagggagcgatacgccgctgtgagattcaggggaggaacgacaccggggagaactggcgaactgacaccgaaatgataccgaaacacgacaatctgatagggggacagtctaccctatcgctgatacttcgggagattttaagcggctctatggctgtaattttgccgaaaatcgccccgaaaccatacactaaaacgggaggaagcgcaatatgccgagaatgagcaaaaagaggaagcatgagctttccttttacctcaatgaccgggggcgtgtcacttacaacgaattatgccggaaatgccagcatgggtgcaggcagagcttccgggcggttgtgattgactgcccccgttatttatccaaacgagcaaagaaaaaggaggaacacaccgaatgaattttgaatttatgacgatagacacaccattgccgccctgtatgccctttcccatagcgttgacaggatttccagtcagcagcaccgcaaaggtcatgtactgccggatgctggacgctatgctatccaaagggcaggaggacgagcacggaatcctgtttgtctgcttccctgttacagccattgccgcagtcttgtcccgcagctctatgacggtcaagcgttctctgaatgaactggaaaccgccggacttatcatgcgggtgcgtcagggcgttggagaaccaaaccgaatttatgtgctgataccgggaaaggaggacgctgcccttgcctgatacctcaaagctggaaaagctcaaccgggagctggagaaaagcgaaaagaaactgcggaaagccatcaatgatgaaaaggcattgcagcaccagttaaagcagcttacccgaaaggaacggacgcaccggctctgtacccgtggcggtatgctggaaagttttctgcaagagccggaacgcctgacagatgatgatgtcatgctgttgttgaaactcatttttcacagacaggacacgcaggaattattgaaaaaactgctggaacggaagaagccagaaaccccttagtttactaagggcgcaattatacaccacccagaggttggtgcattgcgttctccgaaggctcctcgccggagggctgtgattttccgcagtcatggtctgctccaaatcatacaggggacgctacacttcccctgcgctggctgccgccagctacccttttgtggacttgccatctggggacatcttgcattgcaagttgttcccagccgacaagtttcataaaatacgctatcttttcgataggcaatgaagtataataaaattaccaataaatcaaaaattggcgaaggagttgattgatggacatgattagaatacttcaatttttagtattggcttttggtttaaaagaattgtttaatgcaatggaatatcacaaacagaagaaaaagaaatgggtaattgcctctttatgtatgggcatttttgcctgtgcttgtgcaattatttcaataacaggtattctgtaagtcggaattgataaggaaaaggaggatacacagatgaaaacagtaattctttataatattatttctcttatcatcatctttgttttgatttttgtcctaagaattgtcagtaagagtgatttacgtaaaaatcaacaacttattattaaagtcattacaactattttaattgtttgtgtaatagcatttgtgctttttattgatgcaatagcagttggcattataggacctgttccaaattaacaatcccagtttaccatccgcacatcgggtcaatttgccccgaacttttacaattaaatacccgccgcccacatagcggcacaccgagcaggaaatctgaaaaaggtctcctgctttttttctgccaaaatgaggtggtaaaacgccaccccatccaccaattaccgaaaggagggacacgaaatgccctgcccacacaacgaaatcacgattgttcagcgcagccagcgacagtctgcggttgccgccgctgcttaccaaagcggcgaaaagctgttctgtgaatacgaccagcaagtgaagcactacccggaaaagcgtggtatcgtccacaatgaaatcctgctcccggcaaatgccccgccggagtatgcagaccgcaatactttgtggaacgccgccgaagcggtggaaaaacaatggaactcccagcttgcaaggcggtgggtgcttaccatccccagagagataccgcccgaccagtatgctgtccttgtccgggagttttgtgagcagcagtttgtttccaaaggcatgattgctgattttgcaatccatgacccccatccgccgggacacaatccccacgcccatgtcctgctcactatgagggcaatggacgaacatggaaaatggcttcccaagagccgcaaggtttatgaccttgacgaaaacggggaacggataaaacttccgtccggcagatggaaaagccacaaggaggatacggtggattggaacgaccagaagtattgcgaaatctggcggcatgaatgggaggtcatccagaaccgctatctggaagccaatgaccgcccagagcgtgtggacttgcgttcttatgccagacaggggcttgatattatccctactgtccatgagggagctgctgtccggcagatggaaaagcggggtatccagacgaacatcggcaacctgaaccgggaaatcagagccgccaaccgcctgatgaagtccatccggcagcttatccaaaacctcaaaggctggattaccgagctgggagaaaaacggaaagaactgcttgcacaaaaaacggcggaggaagcaacacttcttcccaatctactgatgaaatatatggagatacgaaaggaagaacggaaggactggacgaggtctggacaaaatcgggggacttcacaggacttaaaggcagtcagcgaagccctgtcctatctccagcaaaaggggctttccactgtggaggacttagaagcatttctggaatcttccgggaaatcagccgcagattaccgcaatcagatgaagccaaaggaagcccgcagcaaagtgattgacgggattcttgccagccggacagactgcaaggaatgtaaggctgtctatgagaagtaccagaagatattttttaagaaaacaaaggagaaattcaaacaggaacactcggaggttgcccggtatgaaaaagccgccacccaccttgccaagcacccagatgataaggacagtacccaaaaggagctgcaagaggagcaggaaacgcttctggaagaaatcgcagagttgaaagtaccactgaccgaggtacaggaggatttgaagaagctgcgggacatccgctactgggtacggaaagccacacccggcacagaggaaagtaaagagccgcctaagaagcagcccatcaaggaagtcttgcaggataaggcagacgagaaaaaggctcaaagaaccgccccggcacaggcgaaacacagacaacaggatatggaactttaacaggcacttgccattttcaatcagagaatgtcaggtgcttttcttattttcaaggagggatagatttgaatgtatttgaagctgtgaagcagtccgtcacaacaagacaggctgcggagcattatggaatccatgtaggtcggaacgggatggcttgctgcccgttccataatgataaaaccccaagcatgaagctggatcggcgttaccactgcttcggctgcggtgcggatggggatgtgattgattttgccgccgccctgtatgggctggcaaagaaagaagccgccgtacaactggcaaatgactttgggctttcctatgaggactggaaaccgccgggaaaggcaaaaaagcccaagccccggcagaaatccccggaggaacagtttcaggaagcaaagaaccgctgcttccgtatccttgccgattatctccacctgcttatggcatggagaacggaatatgccccgcactccccagaggaagcctttcatccccggtttgtggaagccttacaaaagcaagcccatgtggaatatctgctggatgtgctgctgttcggggagacagaggaaaaagcggctttgattgcggactacggaaaggatgtgatacagcttgaacagcgaatggcagagcttgcagccgcagacgcagcaagaactaaaaaacaccatgaacgccatgcagccgccccagagcattgaggaaatcaaggcggggctggaaaccaccgagaaaggcggtgtccgccagagcatacggaactgcctgaccgtattccagcgtgaccctctgctttccggggctatcgcatacaacatcctgaccgaccgcaaggacatcataaagcccatcggttttcacagagaaagcacagccctgaacgatacggatatgaagtatctgcttctctatctggaagaaacctatgggcttaccaatgagaaaaagattgataatgccatcgggattgtggcgaatgaaaacaagtaccatcccatccgggactacctaagtgcccttgtgtgggacgggacagaacgaatccgtttctgtctgcggcactttctgggggctgacgcagacgattacacctatgaagcgttgaagctgttcctgctgggtgcaatctcacgagcctttcagccggggtgcaagtttgaaatcatgctttgtctggtaggcggtcagggggctggaaagtccaccttcttccgtctgctggcagtccgggacgagtggttctccgatgatttgcggaagctggacgatgacaatgtgtaccgtaagctgcaaggtcactggattatcgaaatgtcggaaatgatggcaaccgcaaacgccaagagcattgaggaaatcaagtcatttttaagccggcagaaagaggtttacaagataccctatgaaacccacccagcagaccgcccccgtcagtgcgtgtttggcggcacttccaatgcccttgacttcctgccccttgaccgttccggcaaccgccgctttatccccgtcatggtgtacccggagcaagccgaggttcacattttggaggacgaagccgcttccagagcctatatcgagcagatgtgggcagaagcgatggaaatttacagaagcggcaggttcaagctggctttcagccctgccatgcagcggtatctcaaagaacaccagcgggattttatgccggaggacaccaaagccgggatgatacaggcgtatcttgataagtacaccgggagcatggtctgctccaagcagctctataaggaagccttgaaccatgcctttgacgagccgaagcaatgggaaatccgggaaatcaacgagattatgaaccagtgcattgaccgctggcggtacttcccgaacccaagaatgttttccgaatatggcagacaaaagggctgggagcgtgaaaacccggcaacggactccggcaacccgtctgaaaaaacgatggacggttttgtggaggtcacagaacagatggagcttccgttctgaaaatggcagcccgttgcaccccctgttgctatcccgttgccgagccggttgccggggaaaatcccgaaactatcggcttttctcccctatgacaaccaaaacaacagaaaaataaaagaaaagtataaatagtaaccatcgccagattgagattgtttgcaaggtcttttgaagcccgttgccggacttcgttgccgacaccctctgtctggctattttcatgtatggaggataactgcctatggcaaaaaacaaaacagagattcatgttacaacggtgtttgacggggagctggacgcaaccgatgtgttcgtcagcctgatttcccagaaatacggtaagacaaatacgaaagaatatcttgctaaaaggaaagatatgagctataatgaagatgaggttcaaaagagccagataccgtctggattgtgtgggtaaatggctatgatgaacgaaatggaatacagaacaatcggttcggcacttgccggagggtatcgtgcagcggtctattgcaggctgtcaaaggacgatgacctgcaaggcgaaagtgccagtatcgcaaaccaagatgtaatatgtagagggtggtttctaccgcctaatactattacatgactggcggctcatttgtggtgaattggtctggcagttgtgggaaaggaaaaaaatccgcataactgctgacattttagcacgaagggagcatgaaaatgaagtctatttttgaagaaatgggcggcacatatacgaaggttggcgattactatatccccgaccttgcgctgccggagaccgaggaatatcagatcggtaagtatggccgtatgcgccgccgctacttgaaagagcatcgtcccgtcctttatgcacactacctaacaagctgcaccctgcatgaacatcttgcagagatagacaaatcctgcaatcagcgtatggagatcatgtgcgaagctatggcacgactggaaggtgtgaccgaggcacttaaagctaccgatcaaatggaatgggtacggcgcatgaacaacattcataaccgtgcagaggaaattgttctgacggagcttgtatattgctaaacacatgttagccccgcatcagcatgaatgaacgctggtgtggggctaattctgtatcacttagctctttatattccagtagccttttcggtcagacccgatgcgctcgatgattcctttttccttcagctccttcagacgctgagaaactgtttttctgctgatagatagcttatctgctatggtggtagatgtgtatgcaggatcttcggaaatcagggccagaatttgcatggatttttcatccaaggtttctgttaccttttctgttaccttttctgttaccttttctgtcaccttgtaggtggcagatcgaataacccgatcctctgacgctgtaaactgaatcataatatcgccgggatgcacggtgtacgcaggaagcgggcttccatcttccttgcaagcctgacagattttctcaataccacgtccccagctctcgatgaagccggccaaataatacacattcgcaatcgccgtgttgtaagggcgggatgcgtgtttggacatcaggctgtctgccgtccagttgtctggaagcctaccacagttagcgatatacagcttatcctcatacacgctgatctgaatcggaacgccgctttcatattgcttgtggcatagagcgttaagaagggcttcacgcagggcagcgtcgggaacaaaataacgctcaatgcgctgcatcccttcgtaagtgattttcgctttcatatatttcagatggatgacttcaatgatcttgtcaatctgttccaacaaggagccgtgaatttcatcctgataacggagatcggcatcattctcgaaaaagccgatttttgtgtatgcgcccagctgccagcggtcagggtctttgcagaacagcagcatcgctgcgttggtataatacccggcattggtcagacgcagcttttccattaaatccgctttgtcctcgtctaaaacgctttggtcgatccggcccttcttggcggcaagggtcttgaatctcttgaccaactcatcatcaatatcatccaacgtaaatcccggcaagggcatattatcccacgaagcaccacgtttgcgtagaatgaagctctccagttctgggccagaaagggtctgcatggtgctgccgcttctataataatagacacctttgcagtttatggcaacgggatatggtggaacaacgatttccagatattctttcccgtcacgctccagctgattgacatccaccacgatgctcatggcatttcggattttgtttggaacatcctccagcagcttgcggatattgggcaggccgataacttttccatcatcgtcacagccaatataaatcttgccgccctgtgcattggcgaagccgcaaatccattccagatagtcatccttccacttagctttccattctatgttctgattttcaggcattattatcaccatcctctgatttattctttccccggctcttataaacattatactgatttttacaccttgcactgcaaaaagcggagttagcccggttactcaggaacactttctgacactgcttgcacatccgcaacggctttgtgctgtccaccagcatgaagctgaacatcatctgaatccccaacagcagggaatggaaatcccaatagatcgttggcctatccaacagctctatatgataggtgggtgcaatgccgccaaatgcagccatagacttacgcagcatattccggctttcttcctccatggaatcatagtcattataatagaagaaagaggtcagcatattaaatgcccaatccttgagttgctgtgccacccaatcgtaaggctctgcatacgcccgctggaagctcatggtctttgccatcggctcgtccataaaggtcatggtcagtgcaatcattgcccggtcgctggacacattccaactggattccacaccgttcttgaccacatccagcttatcaaaggggtaaaacagggacagatacttctccgtctccatcgtttcttccttgataaaatggttctttggcagatataccgcctcataatccataaaggacggcgtggtgggcagggccgtcatcaggcccagcagcccatagtgggtaataaattccaagattgccttttctacctctggctcagagcttttcttgccgttcatcatcagcatccccacattcagagcatccagcacaatgtccggggcttccttgagtgggttatagacatccggcctggcatcctttgccggggtgatgtatttcttcccgtccttgcctgttttgatttcatagcgttcataccgcacccaatgggaacgggattgctcaaaaaatgtattcataacgcaaatccttcctttcggtcatctgcttatcaaattcaatcagatcattcgctgtccttgctgctgccaagggcagctttctttttcctcggctttgatttgttctcccggaggataacggcgtccttgccataggctttcagcaaaagcccatattcctctaagaactgccgttcccgcagcgttaggcttccacagtcgttctgtttttccaaaaggtaatcataaaccgctctttgcagcttcttgtggatattctttcggagctttctaatgtttcggtctgtctgtccccgtatcatacccacctgtatggtgctgtactgccggatggacaggtaatacagcacttccttctgatcaatggtaaggctgcgtatcagctcagaaataaatgagcttgcaaccaactcatgcagttcataggggcaagaaaaaatgatatccagaaaattgccgctggcaagctggcggtatcgtggcagattcaaatacagcggaatcatcttcggattgggaactgccatgtattctaacggaacatctccccggagattttcatggtcacgctcccgtcgttcccgattccgatccaacctgtcccattcgctgacaacgtatcgaaagtcgtcctctgttcttgcagcatcctccagccgtgccaacgcctctgcccgtatctggcgctttaagcgtttttcgctgacaggagcagcttcttcctcttcgtcctccagttctacggtgtagtcccttgggttttcgtcctgctccagctctctttccagctctaaggctcgttcttcggagaggatttcctctaactgctcgttttgtatcgtcagatcggaggcttcatcccattcggttaggtcatcaccgtcatccgggaacaggagaaatgttctattttcatctgtcatgacctcacctccgaaaattttttgaatttctttcaaaaacagttccgatttacaccccggatttctcctattagtgagagggtaatctgataagcggttatttaggttactttttcaacccgtatcaagagaaaggaggacgcaagttgcggtagctttatgaaacatgacacaagatgccaccgacttacatcagtcggaaccaccattagtatatcaaacgaacatgaatttttcaaggaggaacgctatggataaaaacaaacaggcacagtatatgataagacgtattggcggcaccacctacaaggtgagagtcgctttcagtgaaagtgggaaagagacaatggaggataaaattttacgaatgatacgcaacgaagtagttacaaacgacggaacttgtgatataattggtgtaccacaaatgagccgtcagtctgaaaggagcgcatcatgagcatcattcagactgaggacaagatcaccgccttatacgaacgactttcccgtgacgatgaccagattggggatagcaactccattgtgaatcaaaagaaatacttggagggctattgcgcacagcaggggtacacaaactttgcccattacacggacgacggattctcaggcggcacatttgaaagaccggcatggaaaaagctggtggcagacattgaagctggcaaggtggctcgtgtgatcgtaaaggatatgtcccgaatcggacgtgactacttgcagaccggcttttacacggaggttatgttccgtcagcatggcattcattttattgccatcgccaacagcgtggacagcaacgaccagaacagcaatgaatttgctccgttcctcaacatcatgaacgagtggtacttgcgtgatctgagccgcaagcagaaaaccgctatccgtgtgaagggggaatcaggcaagcctaccaccaacagtgccatctacggctataagaaagacccgaacgacaagcaccattggttgattgacgaggaggccgccgccgttgtgcggcgcatcttccgtctgaccatcgagggaaaaggcccctatgacattgccagaatcctttttgaagataaggtagaagctccggcggtctattttgcaaggaaaggcattggcgtttggaaaagtaagaccgagttcgcatatccttataactggagcggctatattgtggggcagatattgtctaagcctgagtatatggggcatacggtcaatttccgttcccacaagctgtcatataaggacaagacctctattcctaatcccaaggaggactggctgatcttcgagaacacccatgaggccattatcgagccggaaacatgggagcttgctcagcaactgcggaaaacgccacggcgtattgataccataggcgaagccaatcccctgaccgggcttttatactgtgcggactgcggcgcaaagatgtataatcatcgttccagaggcggtacagaaggcactccgtatccgtcggatttctttgactgctcctcttatacactggcacatcagaagcatggaaaggactgctgcgggcactatattaccactaagtcgctgcgtatccttattttagagacaatccgcactgtcagccagcttgccatagcagatcgggaaaaattcaccgagaagatacgagccgcttcacaggtcaggcaggtggaggcggccaaagatgccaaacgaaagctgaacaaagaccgtaagcgccacagtgagctggatacgatcattaaaaagctctatgaatcctttgccgtaggccgaatttctgaggaacgctttgacagcctgcttgctgagtacgaagtcgaacagaaaaacctttccgcacagattgcagaaacggaggaaagcctgacgagctatgaggaagatactgcccgtgtagagcagttccttgctttggcagaaaagtacaccgatttctccgagctgactacaccgatgatcaatgaatttattgataaaatcatcgttcatgccccggagcgcatcgacggggacagaacgcaggaggtagaaatcttcctgaaattcatcggaaagtttgaacttcctgccccggagctgacagcagaggaaatcaagcggcaggagcagctacgccagcatcgcatcaaaagccgggagcgctatcagttgattaaggccgggaagcacaccgttgggcagccttttcagctaacctgtaagtgctgcggtcagggatttgaatccaaaagctcggctgctatgttctgcggaccgaattgccgggcgaagttctaccggcaggaagcggcagaaaacaggcggcgtgactgcacttgtgaaaactgcggtaagaccttttccaccacaagaagcaatgtcaagtattgcagtgatgagtgccgatatgaggggcatatcaaaggccagcgggttcgcaatgcagcgaacaggaaggaaaaactggcagcggagacagttacctctccggcttaatatttccaataaaacaataaattttgaggaagcggtttgccttatatcagggcaagccgctttttctacgcaaaggaggacacatgaatttattcgaaaccgtaaaaaacaacgtcagcctgcgggaagcggcacaggcgtatggccttgaggtcaaccggcacggcaaggcgctctgcccctttcacaatgacagacaccccagcttgtatgtggcaaacgaccattattattgctttacctgcggagagcatggagatgtcattgacttcactgcaaggttgtttgatctcaagccctacgacgcagccatgaagctggtgatagactttcatcttgacccggacaagccgcccagcgcagcggcactcaatgcaaagcgtatccgaacagaagcacagaagctcaaagaaaacgagcgtctgtgcttttctgttttatcggactattaccgttgcttggaggaatggaaagcatactatgcgccgcaaacgccggatgagccagtccatgatttattcgtggaagcctgccacaagctcagtcagattgaatatgaactgaacattctcacctttggtgacagctatgagcgtcgggaaattgtacaggactggatgacggatggtgaaatcatagcactaaaggagcgtctggaacaactgcgaaaggaggaaacctatggacgaattgaataccccaatggttatgccgcctgaagaaagcattcccgattggtatgatggaaaacgcatcaacgaagtgctgttttgtcagcagttcttaaaaaagcatcccatgaaatgtgtcagaggaaggctgttcacagtggatggactgattgaggacgaggcgcaaatcggcaatctcattctggaggagatctccggctgtctgacctccgggctttccaaggtggtggcaaatctgctggccagtatcaagctgcaagcctattcgccgcccctgcccatcgagactgaccgtatccatgtggcaaacgggacactctttctggatgggcgtttcaccgaggacaaaagctattgcaacaaccgtctgagtgtggcctatctccccgatgcaccgccgcctgtgcgctggctgcaatttttatccgagctgcttgtcccggaggacattcccaccttgcaggagtatatgggctactgcctattgcctaccacaaaggggcagaaaatgctcctgatgattggtaagggcggcgaaggaaagagtcgaatcggacttgtaatgcgctccatgctgggagataacatgaataccaccagcatccagaaggtagagaacaaccgtttcagccgtgcagacctggaaaacaagctgctgatggtggatgacgatatggatatgagtgccctgcccaagaccaactatatcaaatccatcgtgacctcagagtgcaagatggatatggaacgcaagggtgttcaaagctatcagagccagctttatgtccgctttctttgcttcggcaacggcgctttaaccgctttgcacgacaagtcagacggcttcttccgcaggcagatcgtgttgaccaccaaggacaggccagcaggacgagccgatgatccatttctggtggataagctgacacaggagcgtgagggcatctttttgtggtgtctggagggtctgcggcggttgattgggaacgagtatcagttcaccatcagcgatagagccaaagaaaatatggagacagtaaagcgcagcagcaacaatgtgatcgagtttttgcaatccgagggctatatccgctttaaggccgacagcgaagccagctccaaggctatctatgaagcctatctccgctggtgcgaggacaacgcacaaaagcctatgtcagcaaatcgtatcagctcagagctggcccagaatgaacggctttataatgtggaggctaccaacaatgtgtacgcagccggaaagcgggtgcgtggatttatcggagtggaggcgatgaacttgcttccttattaaatatgagaactggacttcaaaactgccgtacatgccgtacacgatgtacggcagttctcaactccgttttcaaaaagctattttaccgcaaaatcagcgttctttatgtgcaatgtgctgcgattaccgcattttcttgcggtataaacagcgatttgacaaagcaaacgcaaaatccaaagaccaatcggtgtacagcggcgtacagcactggcgtttaccgtacagagccgtacacaaacaatctattttcaaggccgcacagcggcagaaaggacaaactatgaactatatgaacaataaccctataatcatcggcatcgaccacggctatgggaatatcaagactgcacattgctgctttcctacgggcgtgatcatctctgacaaggagccgaccttcaaaagcaatctgcttgtctacaacggcagctattacaccgtgggcgaaggtcacaaggagtttatctctgacaaaatgacagacggtgactactatattctgacccttgctgccattgcaagagagctgaatatccgcaagcagacctctgcccgtgtgcatttggcggcggggctccctcttacttgggtcagcgaacagaaggatagcttcaaggcgtacctgttgcagaatgaaatggcggatttcattttccgtggtgtcagctatcatgtggagtttgccggagcggacatcttcccgcagggcttctccgctgtggcggacagactgcggggattcaagggcatcaatatgctttgcgacattggcaacggaacgatgaatgtcatgtatatcaacgagcgccgtccgctatctcagaagtgcttcacggagaagtacgggacaaaccagtgcatgattgctgtccgggaaaatctcatgcggcagtttggcgcatcggtagatgatacgattctggagcgtgtgattcgctttgggacggcagacatcagcgaacgctacctaactgctatccagaacacagcgagggattacaccgcaggcatcttccgcagactgcgtgagcatgagtatgacccggaactgatgaggctctatgttgtcggcggtggaagctgcatggtgaagaatttcggagaatatgatgccagccgggtgatgatcaatgatgacatctgcgccacagccaagggctatgagctgctgtctgcacagaaaatgcaaaagaaaggcgatcttgtatgaagcaaatctacacaacaacacttcggctgaatctggagaacgaagcagaccgcagggcgtgggagcatttgcagagccttgacaggcgagaatatcgttcagtcagcaaggcagtcgtttcggcggtcaacgcttactttgaccgtagcaagcagcttgccgatgatccctatctggaaacacgggagaaggaggacgctttcctcagccggatcgaggataccatctcacgcagcttgcagagctgtacgccggtaagccttggcggtatcctacagcttatgcagagcgcacagcctgccgctgctcttgtttcggaggaaaccgaggaggacatttcagctgcgctggattttgcagacggcttttgaaattacttttcttgattttactactatgttggtggcaatacaatccgtctttgctaccaaattggcaattctcagaatgaggaaaacaatttaccatcagttctgcagggagttggtatctgtgtgataccagttccctgctttttactatcacgaagccgcccagcggcagaaaggagccagatatggcaaataaaaagatcatgaccaaggaagaattgcaggccaagcaccgattggaggaggcacaaatgcgggatcgggcgaaagagcgaaaggcccgtaccagacgcttgattcaggagggcgctgttttggagaaagtatttccagaggctcagcaaatggagcttgaaaaattagaggacttgttatatgagaagctacactaatctgcgaggggcgttccgggcaaccggggcgtcccttccttttttatcccgaagggcgcacttactcaccacctgcgaagcaggcggtggtatcccttccgttggtcgggctcgtgcgctcttcacgaactgtccatcggacacttctccagagagggcaggaaatgccgcaagtcagcattccctgtgcagtcggcgcttctgctgatgcagagattgctgcttgtcgcaccaatccggcagatactctgcccgcctcctgcctgcgaaaacctgccaccggcagctttatcgcagatatgggcagcaatgcagcccattttctctttgcaaagagaaacagaaaccaaggggtggcgttttaccaccccctcacaaaatacgaatcgaggtgaacgcaaatggcaatttaccacttggaggcaaaggtggtcagccggggagccggacgctccgcctgtgcagcctccgcttatctcagctgctcccacatcctcaatgactatgacggagtacagcacgattacacccgaaagcaggggcttgtgtggcaggaggtattcctgccggacatggccccacccgcatggcaagaccgagaggttctctggaacgccgtggaggaaaacgagaaaaccaaggacagccgcttagcccgtgagtttgtggtagccctgcccatagagttgtccctagagcaatggcagacgctgttgacggacttcgtacaaaaccaatttgtcgcagacgggatgtgcgccgatctggcaatccacgatcctgatccaccgggtcataatccacatgcccacattctcttgacggtgcgcccgcttgatgaaagcggcaaatggcaatacaaaacggagaaggaatatctctgcagccgtgacggtgaggaacggggctttaccgctgccgagtttaaggctgcacaggctgacggatgggagaaacagtaccagtacaaggtaggcaggaagaaagtgtatatgacaccatccgcagctgaggaacatggatatgagcgtgccagcaagtatcccaaaagcaccaaatacgggagacagaatcccatttctgaacgctggaacagcgaggaacagctccttatctggcgcaaagcatgggcagatgtgacaaacaaatatttggagcgatacggtcatgaggagcgcatcgaccaccgcagctttgtcgagcgaggcattgacgagcagcccaccatccacgagggcgtgattgcccgtgctttggaacagaaaggtatcgtgtccgacaggtgcgaactcaaccgtcagatcaaggcggacaacaggctcctgcgggaactgaaggcgcagttcaagaaaattacggaggcggtgaagaacacgctgcccgctattgcagaagcgttggaaaagctgcgggaaaatatgctgatcttctgctatcagttagggcatatccgcagcagcaagaaacagatgaccggtgccttgaatattctgaagccaaatctggcacagtaccgctcccttgtgcagcagataaaggaaacaaccaaagaacggaagtccctactggctgaaaagaaatcccttcctgcgatccactttgtcaggcaccgtgagcttgcctccaaaatagccgagttgacggaaaagttagaggagctaaaaagcgaaaaggctatgctgcttcattctctggaatacccagaggacgccacaagcgatatcttccagcgccagattgaccgctatgaagataatctcaaacggcttgaggcgcaggagaataagtatgccggagagctggaggctgcattgtctgagtatgccgagctgaaagagcaagcttccggctttgattccttgcagctttatctggagcggaaggcacttcgacctgacagagagaaagcagcagcccaacgcattgaagcggcttatggcgacaagttcagttggtggttgatggagagtggcctacgggatgtgtctggctatcttgacgaatatgcacaggaaaagacaatggatcgagaactgcggcaaaggcggcgatcggagcggcttgagcgtaagatgaaaaacagagatatggaacgttaaaagtgctggaggttgaaacttcaggtgaagtctgtgacatagggggatggagataatccctatacgtcaagcgtaaaataagcaccggtatgggttttccataccggtgcttgcaatatttaatcgaattctatcacttaaaatcaaaagagttttccaacaacttatcaagtgctgccatcagttccgctcgaacagcctctctttcactttctccgcctgcattttcgatatagatggaatagttatcaaatgtgatataggcgtaatagatcacagtcttaattccttcgctgtttgcatttgtaacgaagtagccagctttaactggcgtatctccaaccatagatacatttcccttgccaattacggtagtatccataagattgttcccagacagcgaaacaacaaatttcatatcgctgtaatgaccatcaaagccaacaaatgctacatcgtccaaggtaaagagggcatctccggaaatcggaagatcaccgaaaatagtctgaacctcatctttggtcaatgctcgtgcttgcaagttcaaactcagagcagaggctaccgtatctgctttagtgaaagatatggtagttccatcacctaatgtagctgtttctgtacttttgccgaataatcccatactaaacactcccaccacgattagacagagacacgcagcaattgccccaaatttcagccaaatgcttttttgtttctttgcctgataactcgccgtttcttcgatatgacggctaccaatgccaccaacggcgtcagagatgttctttcgtgtcataaatcataccccgctttctgtaaatgatttttaagtttgcttctgattcgggaaaggcgaacagacacattgttatttgttgtacgaagcctctttgcaatttctgtaatgctatctgagtaccaataccttgctacaaacataaccctgctttcctgatccaagctgtcaaggaaacgatcaatttcctgtgacagctcctttgcatccacttcctgttcaatagtagatgcagaagttaggcactcttccaactcatcaagtgcaacatcatagtaactgtttcgctttagtgcagtatttgcgtggtattttgcggtagcgatattgcgggtaatacgaaaaatataggttctgagtgggtcaggtctttctggaggaattgcattccacgcagcaaggtatgtatcatttacacattcttctgcgtcgggttcgcatttcaaaatgttgtttgcaattcttttgcaagttgaaccgtattttgcagcaagttcagctattgcctgctcagtacgagcaaagaacagttcaatgatcttcacatcctctaacaaggtatccacctcctcacctatgtactatggatctggcggacaatcttacagaagcgagggaaaatttcacacctttattatagtacattgcaattctattttctatcgcctcagcaaaatcgtttggcaccagtcgaggtcgctcggcagtctgaaaatatggtccttcggttttggtagagttgctcgcagcagaggaggcgtaacaaaaaattaaaggtagctgcccggacagaatgggttgggtggaaaaataaataatatccgaaacaggatgacggaaattgttagcgccgagttaattcgtacacagttagtgtttaagtgtttacaaacagcccattgatattgttcgtttgtgcgtatataatatatataactatttgatgcggaggtaaactatgtttgaatacatgacagtacaggatgcggctaaactttggggaatatcggtgcgtcgtgttcaaaagctgtgtgaggagaatcgcattgatggaattgttcggctacctcgtgcatggctaattccccaagatgcccaaaagccggctgatggaagatataaacaaaataaaaatgaatttatagctgacaacaaggagaacacacgatgagtaaattgttattagtggaggatgaccaaagtatcgtatcctcattatcagactatttaggaaatgaagggttcaaaatcgaaaatgctcccggtcaaaaagaagcaatagaaaaattggatagcgaccaatacgatatagccttggtggacattcaattatcaaacggaaatggtttttctgtttgttctgcaattaaagaaagaggaactatgccagttattttcttaacggcttctgatgatgaatatagtgttgtggctgggttagatatgggggctgacgattatatcagcaaaccgttcagaccaagagaactgctttcaaggatcaacagcgtattaaggagaactaagaacacacaaaacattatcagttacctcgacttagttgtggacacaaatcaagcaaccgtatcaaagaatgggaaagagattttgttgtctgctatggaatataagttgctgttagtctttttgcgtaacaaaggtattgtcctttctcgcagaagattgttggagcttttatgggacactactggggagtttatcaatgataatacattgactgtctatatgaaaaggctacgtgacaaaattgaaaccaatccgcaggagccggaaatcataattaccgttcgtgggcttggctataaggtgggttgatatggactttatcagaaataaagaagttaaaaggcaaattgttgtcagcagtattcttattctattttggggcggcattggcattatcgttgatagcaaagctgtgtggattgttctgtcggctatcatttcatccagtgcagtttccctctttttcacatatcagagatacaagaaaattgctgattttagtttgcatattgataggctgttacatggagatgaaaaaatttcttttgggcagtttcaagaaggtgagttatctgttttacatgatgaaatatccaagatgacaagacggcttattgaacaggcagaagctctgaaaatggagaaaggtaatttggcaaatgctttagccgatatttcacatcaattaaaaacacctttgacatcgctgaatatcttaaatgcttctctgtgtaatgaggaactgactgacgaagaaaggtatgagctgatccgcgaacagactatgctcttatcaagaatggagtggctgatagccacacttctgaaaatatccaagctggatgcaggaacgattactctaaagccacaggcggtatacttaaaagatgtggtagaaaaagcaattcgtcctctggagattgcggcagaattaaaaatgcagacaatcacgcaagtgattccggcagaattaaaactatctcttgatactgattggactgctgaagccttggggaatgtaatcaaaaactgtatcgaacattcaccagagggcagcactatcgaaatcaaggcaatagaaagacctcttttgacacagatcattatagaggatagcggaacaggttttcaggaaaaagacatcccccatttatttgaccgattttatcaaggaagtggctctacaatcggtaatgccggtttggggttggctctggcaaagacgatcattgtcaatcagggtggtgtcatccaagcgaaaaatcgggagtcaggcggtgcaaaatttgaaatctgcttttatcgggggactgcttaatgcagcccctttttaagtgacatttttgtaatgaaaaagtaatgaagcagtcacttggctttgctatactgaattgcaaaaatatatggaggaactttttatggagatattaagagtagagaatatctgcaaaacctatgaaatggacaatgctcctgtccatgctttgtcagatgtttctttttccgtcgataaaggagagtttgttgcaatcattggagcatctgggtctggcaagtctaccctgttgcacattttaggtggtgttgacagaccgacttcgggaaaagtatttgtggatggacaggatgtttatgagcaaaatgaagatgaattggctgtattcagaagaaggcaggttgggcttgtctatcagttttataatctgatcccggttttgactgtcgaggaaaatatcacgctgccgattcgattggatgggcgtaaaatcaatcaggagcgtttgaaagaactgctatccacactcaaactggtaaagcgtagaaagcacctgccaagtcagttatccggcggtcaacaacaaagagtggcaatcggacgagcgttgattaacgcacctgcgattatccttgcggatgagccaacgggaaatctggacacggagaacacaagggatattatgaaacttctgcgtgaatccaatgaagtctatcgccagacaatgatcctgattacccatgaccgtgaaatcgcaatgcaggcagaccgtattctggaaattcaggatggcagacttgtgagggatgaggtgatacgctgatgaatatgattttcatgcttacactcaggaatctgttgtcgaataaaaagcgtaccctactcacacttttaaccattcttttgtcaatcagtatgataaccgctattctctgtgggggatggtcgttggttgattttttgaaagagaaagaaaaagtgtatggtggcgattatgactactacatggaggatttgacttgggagcaggttcaagagctatatagtcaaaacaatgtaggcgaagtttcgcttctccgctttgccggaaacagtttttacggggagaaatccaacagtacaatgctctccgttggcgagattgacgagaactttacccaaagattttcgttaaatcagtatttgcttgcagggcgtttcccgcaagatgaaaatgagattgttatttcagaatcttttttgaagaaaaacaacatgaatacagagattggagatacgatttctttaactcttggttcaagaatttgggatgaatataatgcccagctttccgggctgacaaattataggggcgaagaagaaagcttcgttccaacaaaagagaaagcgtatgtagttgttggtattctgtcagatgtgaatgactcaaaaatcgcagcaaactataatgcctttgcaggtgttgacaaaacggcatccgattttgctgcgtatgtcaaggcaaagaatttatccaattcgatctatacagaagccgaagaagtggctgcggcagtagacagtcatgtagcaaagtttcattcggaattgttagtctatcatggaattaccgggggtaaaggagctgcaaaactgattgctttggtggtcatggtcgtttgtcttttgatggctgcatctgcttcaatgatcagcaacgccctctccatttccttacaggaacgaattaagcagatgggaatgctatccagtattggagccacaaaagggcaaaaacgccttagcgtatatttagaagccttccttttgggagtggtgagcataccctttggattggttgttggtatcctgctatctgctctgttattaagtgtggtcagggcagcttttggagaaacattcacttttggcatcgtagaactgtccttgaaggtaaacggattgatcctgctcgtcagcggattatccggcattgcttctttgtacttcggaagtagaaagcctgtgaagcaagcagctaaaattacagttattgaagcgatccgccagtctaacaatgcggtatcaagaaagaaattccgtgacggaaaaatcgtttctttggtttttggcatttatggttcgttagcagcaaaaaatattaagcgtaatccaaaacgcttccgagcgattaccggctctattttcttgtcggtggtaattgccctttccttatatagtttctctgattttatgctttatcagacatccttggatatgaaggaggacggttcctgttatactgatgtgatttcgatgattcaatacaaagatattcctgtcgcaatcggggcattatcggatgaaaatatcactgcggatgtttcctattcttttcagcgatatatgaccgctgaattttcgcaggaacaaatcaatcctgatatgcaaggatattttatcaatggtacgaaagcagaggtatatgtcgtaggattggacgaagaacattttgtctctttttgcgatgaaaatggattcagtctggatgtgacaaatttcaatcatggaattttgctcaatcagactatgggatactataattcggcacaaaatcgggtaattgcaggctcaccgtttcttattgaaccgggaacagaaatcattccgctgggggcatccgaggatgccttgccgattatcgtggaagaaatcgtttcagaagaaaatgcaaatatccaatccatgtttgtgagagatcgagctgtcctcatcgtgcctttaagttattttaacttgctgatagatgataacgcctatgtggaaatgagaatacagacagcacagcataaagaagcaatggaatgtctggctgacagaggatttccgcaaactgtggacattgcagccgcaacgaataattccagacaggtatatacgattgcaaaactggtaatctgcctgttctcgatcctgatgacggttattatcagcttgaatgtttgtaacactatctcgaatacgattcatttgagaagaagcgaatttgctgttctgcgttctgttggtatgactgccaaaggattaaaatgtacgctattgctcgaagctgttttgtacggcgtaaaagcattggttcttgcgttgcctgtgagctttttgattcattgtgctatctactacttcatatcgtcgggtatgacaccatttgctttttatatgaacggcggtatttatgctcttgcagttatggctgtcggcgctatggtatgtatcgctatgctgtttgctgttagaagcgtatcaaaggtggaaattgtagaggaactgaaattgagcaatatgtaatcattcaatctaacaaagcaactgaaacagaggtaatagaaattgcgtaaaaagaaactggtaaagagagttgcaggcattgctttgactgttggtgcagttatacttgccattgtatgtgttggtaaagtaaatcgcattcagaacgaaaaagatattattggcacatggaaggatgcaaatgctgaggagatatttacctttcaagaaaacggggaacttgctgtgagtaaagatatgcccgattcgggtctatcctgcggtgacgcatattatagtttttcttactcggatataatctgtgttacacagggaaatagtagtgtagaatttgagatagaagtagatcaaaacgaattgaaaatcttcttcatgggacaagaatatctggaattggaaaagtaatgattacaaataaaagaaaaccattgagccgataattcgcatcctttgcggactaacggctctgcatatattttgaacgctattttcagaaacattgtgttttgcagaaaagccccttgacaaattccatctcagcgtgatatgctggaaaaatactgcgaaaagcagggatgggaggttgtggcagtctatcaggacgatggcttcacaggtcttaatatggagcgtcctgatttacagagaatgttgagagccattgagcgcaggcaaatcaaccttgtcatcacgaaagacctcagccgactggggcgtaactatctgcaaaccgggcatttgattgaggactttttcccaagaaacggtgtccgctatatcgccatgaatgacggtatcgacaccctgcgtgataacaacgatattgccccgttcaagaatatcctgaacgagatgtacagcaaggatatttccaagaaagtccattcctcttatcttctgaaagcgcagaaaggacagtttaccgggtgtcttgccccgttcgggtatcggaaagacccggaggacaaaaaccatctgctcattgacgaggaaaccgccccgattgtgcggctgattttcggatatgccctaaacggtcatggtccgaactatatccgcagacggctggaggaagaaaaaatcccctgccccacatggtggaaccgggaacgggggcttcgcaatacccgcaccaaatgggaaaagaaagacccggaaaacgggcggtatatgtgggacttctccgttatcaaagaccttttgatgaatcccgtctacaccggggcgattgcttcccagaaaaaggactaccgtttcaaaatcggcacgattggggaaaagaagccggaggactggattgtggtggagggacagcatgaaccgctgattgaccgcatgagctttgacattgtgcagaacaagctgaaatcccgccagcgtccggggcagaccaatgaaatcagcctgtttgccggactgataaaatgcggtgagtgtgggaagtcactgacgatacgctacacaaacgcaaaacatccccagcagatttactcctgcaaaacctacaatgcctttggaaagaaccactgcacccagcaccggattgattatgacaccctttacagccatgtgctgcggaaaatccgggaatgtgccagagccgccctgatggacggggaagcggttgccgaccgcttgaccaatacctgtgaagccgagcagcgggaacagcgggaagcaatggaacgctccctcacaagggacgaggaacggattgaggttctggacaaaatgataatgcggctttatgaggatatgattgcagggcgtatcagtgaacagaatttcaacaccatgctggaaaagacacagaccgagcaagcggagcttaaagcaaaagtgtccgagggcagaaagcggctgtccgatgaagtccagcttgccaatgacgcaaaacaatgggtggaagccattcaggaatacgccaatatcacagagctggacgcagccaccctcaaccgcttaatcaaagaaatcgtcgtgcatgagcgcattgacgaagataaaacaagacacatttctatcgaaattcattttaatctcaaacccatcccagaggtggaacaggtcactgcctgacctgtcccgccgggacggttctcttaaaaacaccatatagattttttgtacgccgccgcccgccatcgagcagagttttacacctaattggggataaaacagctcatggcgggcggcggcatcatcgtgctgggcacgaccctgatccctctgctgtctaccctgttttaagggtagctgccgatgggtattctcaccgaatggatcacggaatggctcaaagggcttttgatcgagggcatcatgggcaacctcgaggggctgtttgacacggtgaatacccgcgtcggggaaatatccgtacaggtggggactaccccggcggcatggaacgccggggtgttctccctgatacggcagctttccgaaacggtgatattgccgattgccggattgatcctgacctttgttgccacctatgagctgatccagatgatactggaaaagaacaatatgcacgagttcgacgtggcgaatatctacaaatgggtattcaaaactacttgtgccatcctgatcctgtccaacacgttcaatatcgtcatggcggtctttgacgtgtcccaaagcgtgatcgcaagcgcggcgggcatcgtcacaggcgcaaccgacatcacgccggatatgctggctgatctggaaatgacccttgaaacgatggagcttggctccctgttgggcctgttcctgcaatcgttcctcattaagtttaccatgctggcgctgaacatttttatttttgtgatcgtatatggccgcatgatcgagatatatctgctgaccagtttagcccccatccccgttgccacactttcaaaccgggagcttggcacgatgggccagaattatctgcgctccctgtttgccgtgggctttcagggtatgttgatcctcgtctgcgtggctatctatgcggtactcattcaggggattgccacaggcggagatcccatcggcgcgatttggggctgcatcggctatacggtgcttttgtgcttcatgctgatgaaaaccgggacgatctccaaaagcatcttcagcgcccattgagaaaggaaaggtgatcttatcgctgataccgccgcttctggtcacggtggccagaagccgatcccggagggcctgcacctctccgacggcattgagggcctgcgctccctgccaaagcatagcgtggatatgctcttgaccgatccgccctacggcacgacccggaacttttgggatgtaccgctgccgctcccggagctgtgggatgcggtgaaatgggccgtcaaaccggagggcgcggtgctgtttttcgcacaatgcccctatgacaaggtactgggcgcgtccaacctcgccatgctccgctatgagtgggtatggtataaaagccgctgcacgggttttctcaatgcccgccgcgctccgctgaaaaagacggagaatattctggtgttctaccagaagtccccggcctacttcccgcagtttgaacagggcaagccgtacaagaaaatccaccgttgcagcggaaacagccccaactacggaaagtttgaacgcaccagcggcgagtccgatgggcggcgctttccggggaacgtgctggcgtttcccacggtgacaacaacggtacatcccacgcagaagcccgtggccctgtgcgagtacctgatccgcacctacacacgccccggcgaggtggtggcggacatctgcgctggctccggcacaactgccgtggccgcgctgaacacgggccgccgcttcatctgctttgaaactgccccggccttttacggccccgccacggagcgcatccggcgggcacaagaggctgtggcgtctggcaggaaaggagaatgatgacaggaacctacgagattatttacgctgatcccccgtggcgctactctgcaaagaaagtgcagggggcggcagaaaaccattaccccaccatgagcattgatgaattgtgtgcgctgcctgtggccgagcttgcggccaaggacagcgcccttttcatgtgggccacgttcccgcagctcccggaggccctgcggctcatccgtgcgtggggcttcacctataaaagcgtcgcttttgtctggctcaaaaagaacaaaaaggcggatagctggttttatgggctgggcttctggacgcgggccaacgccgaggtctgcctgctggcgaccaagggacacccaaagcggcaggccgccgatattcaccagtttatcatttcgcccatcgaaacccacagcaaaaagccggacgaaacgcgggacaagatcgttgccctcatgggcaacaggccccgcgtggagctgttcgcacggcagatctctcccggctgggacgtgtggggcaacgaggtggagccgacagcgggcctctggtcacggtggccagaagatagtggaaaggaggatgcttcttgccctatgtgaatgttcccaacgatctttccaagattaagacgaaaattgcctttaacctcacccgccgccagcttatctgcttcggcggcgcggctgccgtgggcatccccgtgtatctgctgacccgtcacgcgctgggcggcaccggggcgatgttcctgatgatcgcgctcatgctcccggcctttttcatggcgatgtatgagcgtgacggcctgccttttgaaaaggtagcccggaatatcatccgggccaagttcctgcggcccggtgtgaggccctatcagacgcagaatatctacgccccatttgcgggaaaggaggtcacacttgagcaaaagccccaagaagtcaaaaagcctgacgcgggccggtaatcgtccggcgaccatatcggcccagcagaccattccctatgtgcggatgctgccggacggcatttgtcagctccccggcggtgtctacacaaaaacgctggaatatgaggacatcaactattccgttgcgtccgccgaggatcagacggccattttcggcggctggagttcgtggctgaattattttgacagttcgctgccgttccagctttcctttgtcaaccgccgcagccgctccggaagccgctacaaggtgaatatctccgaggcgaatgaccgcttcaacagcgtccgcacggaatacacggggatgctgaaaaaccagatcgccaaaagcaacaacggtatcgaacgggccaagtacgtcaccttttgcatccccgctgaaaatgtggccgccgcacggccccgtctggaacgtgtagaggcggacgtgatcggcaacttcaagcggctgggggtacagagccagccccttgacgggcgggaacgtctggccctgctgcacggccagcttcaccccggcagccgggagccgttccgtttcaagtgggcggacatcgcccacacgggcatgggaacgaaagacttcatcgtgcctgacagctttgacttccggcagagccgctcgttccgcgtgggccagacatggggcgcggcgtcctatttgcagatcatggcgtcggagttgtcggacaagctgctgttggagattttggagctggatgccgagctgaccgtcaccatgcacattcagacggtggatcaggtcaaggccattaaaacggtcaagggtaaaatctccgacatcgacaagatgaaagtggaggagcagcgcaaggctacccgcgctggatatgaccctgacattcttccgcccgatcttgtcaccttttccaaggacgccgccgagctgctggctgacctgcaaagccgcaacgagcgaatgttcctcttgacgttcctgatcgtcaacaccgcccctacgcgggagcggctggaaaacgacattttcaccgtgaacggcatcgcgcagaaatataactgcgccgtcaagcggctggactggcagcaggagcagggctatatgtcctcgctggccctcggctacaacggcattgaaattcagcgcggcatgaccaccagctccacggccatcttcgtcccctttatgacgcgggagcttcgcatggatggcccgtccctctactacggcatgaacgccctgtcccataacgtcatcatggctgaccgcaaaaagctgaaatccgccaacggtctttacctcggctccacgggcagcggcaagagctttgccgccaagcgtgaattgctgaacgtctttcttgccatcccgcaggatcgcatcatcgtggtagacccgatgggcgaatatgccccgctggtggagcggctgggcggtcaggtcatcgagatcgcgccggacagccccaaccacatttccccgatggatgttcagatggacatgggcggcggggacagccccctgtccctgaaagcggattttctgctgtcgctgtgtgagctggtggtgggaggccgggatggtttgcagcccatcgagaaaaccgtcattgaccgctgtgtgcgtcaggtgtaccgggaaatggcgctggggctggaaacggccaaaacgccgctgctccaagatttgtatgaggagctgctgcgccagccggagccggaggccaagcggatcgccacagcgctggagctatactgcacaggctccctcaacctctttaaccatcctaccaacgtcaacctcaattcccgcgtggtgtgctttgtgctgaaaggcatgggcgaaaacctccgcaagattgccatgcacatcaccaacgattttgtcacctctgcggtgggaatcaacttcaaaaacggcgtggcgacatggtgctattttgacgagttccatattctgctccgtgatccgctgaccgccagctacttcgtgaccgtctggaagatgctccgcaaacagggctgcgtcccctcggccctgacgcagaacgtgaaagacctactggccagccgggagatcgagaacattctggacaacacggattttatgatcctgctgtcgcaggcgcagagtgaccgcaccattcttgccaagcagatcggcatttcagagcaccagctatcgtatatcacgcagtccaactccggcgagggcctgctgttctatggcagcgtcaccatcccgtttgttgaccgcttcccccgtggcgagatctacgacctgctgaccaccaagccggaggacgctgccaatggaaaacaggcagaataagccgcccaagggcggggctgcttctggtcacggtggccagaagttccatactgacagcgaacaggccaagctccacaagtccaagctccgcatggagagccgggaggaacggctgaacaaggcccgtgaaaggctggcaaagcagaagccgccgaaaaagcccggccccatcaagcggatcgcccggatcgccggacacaaaacccacgcttttctgcacggaaaagtgtatcaggaggagcgcgacaatgtaggtgtggagggcggtcattttgtggagcgttccggcgaggccgcgctgcactatgggcggcacaaggtacgcagggtcatccgggagcacccggccaaagctgccgcccgtgcggagtcccggtacatcaaggccacggcggactaccattcccgcaagttcgcacaggagcagccggaggcgcaaagcgccgccgcccggttatggcaccgccacaagctgaaacgggagtatcagcgcaaggcgcgggaaaccgccaagcagaccgccaaggctgccgaacaaaccgcgtcagccacggagcggtttgtccgggaagcggcggcgttcgtcaagcggcatcccgtggggacgctgcttgcgctgggctgtctgctggtggtgctgaccctgcaatcgtgtatgtcctcgatggtgtccgtgggaaacagcacccttgcggccatcgccgccagcacctataaggcggaggacgcggatatgctgggagccgaggccgcctactgcgctctggaggacgagctgcaacgctacctcgacacctacacccgcacccacgattacgacgaataccattttgacctcgacaccattgaacacgatccctatgtactgatctccatgatctccgcactccatgagggcgcgtggacattggacgaggtgcgcgggacgctgcaagacctctttgaccgccagtacattttgaccgaggatgtggtggtggaggtgcgctaccgtaccgttacccggacggacagcgagggcaacgactatgaggtggaggtgccgtacaactattacatctgctatgtcacgctggaaaacttcaatctctcccacgtcccggtttacatgatgtccgaggagcagctttccatgtacgccctgtatatgtccacgctgggaaaccggcctgatctgttcccctcgtccggctatattgggaaatacatcaccaaccgcccaccggagcatgaagtcccggagtcctatctggacgatgaaacctttgccgccattctgaaagaagcggaaaagtatctcggtttcccctatgtgtggggcggcagcagtccgtccacatcctttgactgctccggcttcgtcagctatgtctacaatcaatgcggctggagcttcgggcggctgggggcgcagggcctttataacatctgctcccgaacgagcggcccccgccccggtgatctggtgttctttgtcggcacctatgacacagcgggtatttctcatgtgggcatctatgtgggtgacggctggatgctccattgtggcgaccctatcagctatgccaacctgaacagcagctattggcagtcccatctttacgcctacgggcgactaccgtaaaggagatttttgatatggcaattacgaaaagcgcgaaaatcgaggccgagattgaaaaggtcaaggccaaaattgccgagcagcaggcacggcttaaagaattggagcagaaaaagctggaggcggaaaacagtgagatcgtggagatcgtgcgcggcatgagtatctcccttgccgatctgccgctggtgctccagcagctccggagcggcgcttctggtcacagtggccagaagccgacggaacagacggaggtgacggaatgaaaaaactgcggcttttgctgataacgctttgtgtgtccgtcctcatgggtagtatggcggtcacggcctacgccgggggcggtgaggaatgggacggccttgacccggtggagccgctgcccgccgaaaccgttgaccccggcgagggctttaccgaggatggaaaccttgtgacccgtgatctgctctacgataaggccaccaacaagcagttcatcacggtgcagaccagcggcggcaacaccttttacatcgtcattgactatgacaagcccaccgatgaggacggcgagcagtatcagacctattttctgaacatggtggacgaggccgacctgctggcggcgatgcaggcggcgggcggcgaactgccggagtgttcctgcaccgacaaatgtgccgtgggtgccatcaacacggattgcgctgtctgcgccgtgaatatgagcgagtgccagggcaaggccccggagcctgcgcctgtggtagagctggagcctgaccccgagctggagcagccaaaggccacgggcagcggcggtatgcttctgctggcgctggccgtggtggtcattggcggcggcgctggctggtacttcaaaatctaccgtcccaagaagcagcgggccgctgagtctgaggcggactacggcggcgagtatgacggcgcggaggattatgacgaaaccgatcctgaggatgacgggccgccgtgggacgaggacggtgaagaatgaggtttaccaacagcccctatgaggactttatgaaagaaaagagctacttcaagggcgtctcgcccaacctgccgcccaaaggctcccgctgtgacggctgcccctattggcatgggatcggctgcgtgttctgctaccgggagcagctcagggtaaagacagggggcaaaaatgaaccgtgaattgacccggcaggaaaaggcggcgatccgctcccttgtgaagcggtggtgtgccaactatgacaaagacattggctgtctgccgctggattgcgagtgctatatgctggggaaatgctggacgggcgcttattgccgctatttccgttcggcggtgctgccccttgatcccgtgctggaaaggtcgctgaccgtggagaccgtggcggaaacccggccctgcccggtgtgcggcagggctttcctcccggacgggcggcagcggtattgctccccgacctgcgcccgtgctgcaaggcggcagaagcagcgcggctatatgcggaaataccgggggtaggctgtgagcatttgaccccggaaaccccccttaattgtagggctttccggggccgcttcatgggcggggcgtatgatttcatagccccgcccggttttgcagagatattgctaacattttggaaaggaggtcgtatggacaaaaaccaaggctatgagatcattcaggccgtcatgctggaaaatggcaggggctttgcgctggggcatcatcctaccgctccctcgccctatgtcacatgggcttgctatgacgacaaggacggccagcggcagtatgaatgggggcattacggcagcgaccgtgccgctctggaacaggactttgcggcgcgggtgcaggaataccagcgcctttacaacgtcgatgtcaggcaggtcgaggctcccggcctttacaagtattactctacccagcgccctgtggacattgggacattccccaagccgccccgcaacgctccggatgagattgtcaactacgatcagcgcgtcccggttgaaaatggatcatttctggcgtgggggcatttgacctacacacggccattgacgaaacggcaggcgtctgactatgagctgcggcctgcgcctgacaatcccgacaggccccgttcgatccgggaacagatgaaaaccgccgcaaagcaggccgaggctgaccggggccaagctgccccaaagaaaaatgcccctgaccggggcgacagataggaggacatttatggatcaggaacgcaatcccaacaagaacgccgagctttctatggagcagaactataatcagattgacggcatcatcaacaatctgcctgtgccgcccccggaggataagccgctggacaaagtacgggaacatccgcccaagcgccgcagccgggagcgtgaggagcgttgacaaagaagcgcgtccgcagcgtccccatctatgtgtgggtacggcctgacgagctggaggtcattcgggagcgcatggccgaggcgggcatccgcaacatgagcgcctatatccgaaaaatggcgctgggcggctatgtgctccacgttgaccttgaacccgtcaaggagcttgtgtcgctccagcggcgctgtgcaaacaatctcaatcaggcggccatccatgccaacagctatggcggcttgtacccggacgagctgaagcgtctgcaaaaggactatgccgatctgtgggggccgctgtctgatctgctggcccagctctccgccattgtaacgatgtgacacagggggaacggcctcgcgccgttccccggctgtccgcacctctggtcatcgtgaccagaagtgcggagggccgggacatccttgagtgacgattttttcagagttataatagacatatacaggaaaaaggaggaaccccctatgcggattatattcaaaatccttgccgctccctttgtgctggtgctgaccctgcttgtggccgtgctctcgttcctgctgagtctttccgctggtttgctctccatcctcgcgtcggtgctggggctgctgagtgtcctgatgctgtttgtggagaaagacatttccacggggatcgcggggctgctgatggcgtttgccatttcaccctttggcctgcctgcgctggccggatggctgcttgccaagctggacgagctgaacggctccctgcggggcttcatcatgggctgagttctggtcacggtggccagaagatgcagaaacggcggctgatcccagccgctgtttgtcgcatggaaaggagggctgcctacggccacaacctacctcaaatcccacaagcaggccgataagcggacggccctgcaaagcctgaaagaccgctttggctatggcctgaacccggagaagctgggggccgtttcctcctacctctgcgatccggccacagcacacgccgagttcatgctggtcaaaaatcagtatcagggggaaactgaccgcatggccggacacggggcgctgtgctaccagatccggcaggcgttcccccacggcgaggtgacgccggaggaggccaaccgcatcggctatgaaacggcgatgcgctggacaaagggcaagtatcaattcttcgtctgtacccatatagacaaggagcacattcacaatcacatttactacaattccaccgcctatgaccgctcccggaagttccgcaacttcatcggctcctcgttcgccctgcggcggctgtctgaccgggtatgtctggagcacgatctgtccgtgattgcaaatcccaagctccacagcaaggggcggtatctgcactacggtcaatggctgggggaaaatcaaaagctctcacagaaagaacagatccgccttgccattgacgcggccctgacggagcgtcccaaggacttcgcagattttctccggcgcatggaaacggcaggcatacaggtcaagcgcgggcgcggcggcgcgatctcattccttgtgccagggcaacagcgggcggcccgtttccgggcatccacgctgggggacggctacggccccgaggacgtacaggccgtcattgacggcaaggctcccacacgaacggccacggcgcggaaagcgcccgcaccccgccgtgtcaatctgctgatcgatattcaggagaggatgcgtcagggcaaaggccccgcctatgaacgctgggccaaggtgtataacctcaaacagatggctgccgcgctgcaatatctgaaagagcaccagctatttgaatatgacgatttggccgtaaagaccgacgctgccacggaacggtttcacacgctggctggggacattcagcagaccgaggccgagctttcccgtgtgtccgatctgatggccgccgtggtgcagtacgcaaagacccgccctgcgttcgatgggtacaaggccgccaagtacaaccggaaataccttgccgagcatgaggcggagctggccgactaccgggcagccaaggcgacaatggccgagctgctgggcggcgagaagctccccaaaatggacgtactaaaagaaaaacgccgccaactggcagcgcggaaaaaggctctttatttggaataccgcaaggcccagcaggatatgcgggagctggtggcagtcaagggcagcgtggatcacctgcgcgggctgacggacagccagcgaaataaggagcaggcccgttagggacggcgacgcagacaacatttcttctggtcacgatggccagaagtccagcgggtttgggggcaccccaacaagcatttccgcagcgcggaaattgcaagtgtcaatacacttgccttgcttgccatttagcggcaccccaaaaaagccccctaaaaacgaaggctcttttacttgacctccgtttctctggcgttcttcaatgcttgtattgtagcttcaacaacttgtaaatccttttcatccagtgagttcagcatagcgttgatccgctttctacaactgctcgctgtatttttggacggataaaagtattggtctacggatatgtcaaacatcgtgaccagttgataaaaagtattgaggctgggatgctggccgtcattttcgttatacatgatcgtccgtggagaacggtcaacaatataagccagttgctcctgtgtcatgccgctggcttcacgggctcgcttgatggcaagccctatatcgtggaaatcaaatcgtcgttcatctcgctctatcttcataatatcacctaatgtaattttacatttcaggtcatagtatttgaacgacttttgttttcatactgccgactatttaatttcatatctctgtcattttgtatctcagtagcctaaaagtgcaactcatgtttgacaatattgaaaaacacgaaaattcccatataatagccataagggggtgatttaacttgaaaattaggatcaatgacaggccagatattcaagaaatcgaagtcatcattaactgtgtggccgatgatccgcttgtcaataaaatcatatccgcattaaatacagttgatgccaaacttctttgccgtcggcaaggagaaacattccagcttggtttagcagatattttatatattgagtccgtggatagaaagacttttctttatacagaggagcaggtgtacgaaacagatagacgattatatgagttggaggactatctgaaagaccattctttttttcggacatctaagacaacgatcatcaatctacggcgaacaaaatcaattcggccagagattggggccagacttttgctcactatggataatcaggaaaaaattattgtatcacgccaatatgctggaagcattaaacacgctttgggggtgaaataaatgaaacaatatttcggtgcgatcttgcgttttttcaaggctgttttctttacttttggattgcttatattcctattttgcgttcggagatatttacccggttttaatggcagtcagggggtcggtctggttgaattgcgcctttgtctggctatggcagttgttttttctatggcacacactataatcacctcggatcgtgtgcctatccggattagtttgattgcaaccggcgttcttagctcaattacctgcggtgtactgtcggtctattcaggtattccatctgctatcataaggtggttcgatattacagacaccacagtagcaattctttcgtggtgggctggctttttcatctgcttcgtagtattgttattcatttattttgttgtggagcgttattatcgccatttggagtatcactataatgaggctctcgccaagtacaaagaaagtagtggtaaaacaaaatgaaactgaaagtcaaagatattagtaagaattataaccgatattccgctctgcgtggggtcaatctggaattagaacccggcctttatggactgctggggccaaacggggcaggaaaatccactctgctaaaaatcatagctggtattcttcggcctactgctggcagcatacttttggacaacgagccagtatcgaaacttggggagcactatcgtgccatgctgggctatatgccgcaagacctgggaatttaccctgagtttaccgcgaaacgatatttgctttatattgccgctttgaaaggactgacagaggctcaggccaaggcggagatcgataagctgttggaggccgtagggctttcctcgaatgcagagcaaaagctaaagggcttttccgggggaatgcttcgtcgtgttggaattgctcaaaccctgctttgtaatccgcaaatcctattgctggacgagcctactgctggtttagatccacaggagcgtgtacggctacgaaatcttttgtcagcgttagcccaacacagtattattattttgtccactcacatcgtttctgatgttgaactgatcgcagaaaaaataattttgcttcgagaagggcaaatagcggcctttgatacggttgctggccttgtggggaagtcaaccttggaagatgtgtatctgacctattttcaaaaggaggcgtaatatgcggttgctcacaaaattagagcttgataagctcatacgccggaaatacctgttgcttggtagtctgctcctgttggggtactcctcatttatgtttttttcctgttgcatgaactcatcccccacctttccagtggaaactgctgacggtgtggaagtaacagggcgtgcggcggcactttacaacaagtccgtttatgagcaatacgcaggagaattgacagacgaggccgttgctcatgtgttggatgactttgtagatttgcgggatgctcatggggaacattcgtttaactggcctgtcatttatgacaatttctcaatttttcgagctgctgatcaggctgaccgtgagcgttcagaatatggatatatcagcgttgctgatgcgggagtcctatcctttcattcgcctttagtcttttcttttgattatacttggcagactgcttttaacattctgtttaactcgaatgtagtatttgccatttttcttctgatcgtgttggcccctgtcttttctgaggagtacagtagcggtgcggcaaatgtcattctctccactcgttatggaaagagcaaggtgatacaagcaaaatttaccgccgcttttttaattgcagccatcagcgcagttatattttgtgtggtcatccttttagcctgtggagcctattttgctgggttcgagggttggaatgcggatattcaaacgcagtttatgtcaaatcaatcgcaaatccccatccgtatgaacaacttgcagtttttccttgttgttatgcttttctattggctatccgctgttggaactgctgtgctggcctgttgctgttcggctctatgcaagaagtcactcatagcgttgattatgagcggtgtgctctatttccttccctatttcccgatgaagttaggcggtgtacttggtgagtggatgttcatattccccatttggtctgcaaaagcacaatgggtattgagaaccgcagaacataagttagtcaacctattgccgctctcctgtgaaatgcctgtttggattgtaatatttacgctgattttcacagtagtatcgtttctaatcacttgtaaatcgttttcagaatatcaaggaacataagccctttaataacagaacaatctgccggacgacggcaaaagaaaaaaagccgtcgcaacgcagacataatttcatgcgcccaagaagcggcggcccgattttcagagccgccgcttctcttgttacctacaaaataaagccatgagtacggcggcacataggaggatgccgccgtgttcatttttgcttttcacagtacccatgatctgcatcagttaaaaaaagcgtagctccccctccgggttattccggctatggatgcgaaatatggcagtatattaaggaaaacgtattttcatgcgctcgtatggctttatgctgtgcgggcgcttttatatatcctccccctcgcttctggtcacgatggccagaggcgccaaggtgccgggggccgcctgttctccatttcaatccgcactcaccaaccaccttttgaaatggaggacaattatgacgactatcaatctgaaacggtattacccctatatgaccgaaaatgtgatgctggaagtttcggacgagatcgccgccaccctctctatgggaggccgcctgtgcgacagctacaaacgacagaagcgcagaaatggcgagtgctcgctggacaccgatcccggctttgaggccgacgtgctccgccagcccatgaccccggacgagtacattgaggcacgggaaaccacctttgccctctatgacgcgctggcccagctcccgcctacgcaggcccggcgtgtgtaccagcattatcttctcggcatgagcaaggccgagatcgcggcagccgagggcgttggccggagccgcatctgctgctccattgagcgcgggctggccgctatgaaaaatattttgaaaaaatctctgtaagagggagtacatttgcccccgaaacctcctgataggtgagaggagttttcttcctcgccttgaaaactgaatagacagtattcccgatacgaaatccgcgtgatagcgacgtaaggtgcgccgccacgacagccagttcaggaggtgatgggcaagctggccgagcgatcaacgcagcctttgacccggtgctggcaaaccgggcgcgaggacagcgcggaggataatgaaacttgctcacgccctcccacagacttgagggggagcccctgcggtatgcgccagccctccacgggcagcggtactgtggggctatgcagccgaagccatcggcggtctggaatactccccgtgccggggatgcgtggcaaatacggcacacaacaatcatacagggagccgtccaaccgggtctttctgtcttatgacagcccaaaccattccggcgcggcggctccctcttttgtggattgaaacggaaaacaactgtcccgctgcttctggtcatcgtggccagaggtggggcaaggtcaaaggacggcgcttttgtgccgtcctttcacgtttccccacggacaacgggaaaccatcaaatttattcacaccgctgattattataggaggttttcagatgacggaggcaagagtcggctatcacaaggaagtcaaaaccgcgtcttttcagggcaaatccatcaccgtggaaaacctgaccccgatgctctctccccgagcacgggataagcgcaagcgtgagattgaaagctgtctgtatgaggtctttgtgaagtatgcgccgggacgggcgcagatgcactaatgcgggacatccttgagatgcggggctgccagaggtataatataggtgtaaggtttggtagctcctacacggaaaggagcaccaaatgattattcgtgaagatgccatttatggcagacagtccgttgaccgcaaggacagtatcagcattgaaagccagattgagttctgcaagtatgaattgagaggaggcaatttccgcaagtacaccgacaagggctattccggcaagaataccgacaggcccaagttccaagaaatgatggccgatattcgccggggcctgatcaagcgcgtagtggtctacaagctggatcgtatcagccgttccattctggacttcgcaaccatgatggaaacttttcaggaatacaatgttgagttcgtatcttccacggagaagtttgacacgtccaccccgatggggcgggccatgctgaatatctgcattgtgttcgcccagcttgaacgtgaaaccatccagaagcgcgtgaccgatgcctactattcccgctgccagcacggttttcacatgagcggcgcggccccctacggcttccaactggagccgaccaccattgagggcatccgcacaaaaatgatgaagcctgacccggaaacggcagatattgcaaagctgatgtttgaaatgtactctcagcccgcaacctctttcggggacatcgcccgttactttgccgacgagggcatcctgatctacggcaaggaaatgacacggggctttatctcccagcttttgagaaatcccatttacgcgcaggccgacctcgatatgtacgagttcttcaaaagtcaggggacggtggtagtcaatgaagcgacagattttgccggaacaaacggctgctatctctatcagggccgggatgtgcaggaaagaaaaaacaagcacctgaaagatcagatacttgttcttgctcccagcgaggggctggtatcgtctgatacatggctgcgctgccggaagaagctcatggcgaacaagacgttccaaggcgggcgaaaggcaaagaacacatggcttgccggaaaggtcaagtgtggccgctgcggatacgcgcttatgagcgtcggcaatccgacaggcgttcagtatctccgctgctccaagcgggccgacagtaaaagctgtgacggctgcgggacgctccgtacacgggaatttgaaaggttcctgtacggcgaaatggtcaagaagctgtccgagttccagacgctgacggcaaagcgggaaacggtcaatcccaaattgaccgcgctgaacatggagcttgcccgcgtggaggaggagattgaaaaactgctgaatactctgaccggggctaatgctgtgctgctgtcctatgccaacagcaaaatcgaggagctggacacacaccgccaagccttgacaaaagagatcgcggcgctgtcggcggaaatcatgtccccggagcagatcgagcggctgtcggtctacctcaaccaatgggaagaaattgactttgaggacaggcggcaggttgccgacggcctgatctcacagatccgcgcaaccgacgaacacgtttcgattgagtggaaaatttgacttttacttatccatcgcacacgacaaagggctgtgtgcccttgtcaagcgatgtaagtataactacttagatattgcgagatcggggaccaatctctctgctgaaactaaagaagtgtatcgaattccgttttcaattgataacaaatattatgaactgaaatacattattgggcatcagcagcagttagggcttttagaaagtttcgaaatgtctggaaaagctgttgtttcgttgaattctactgacataaaagaatgctataaaatcgtcatattacttgagaggttcatgaagtttatttctaactcatcggatgtatactttcgacgtattacttttactgatggagtacgtcctgcagcattcttttattgtaaatctgtttccgaaaaatcatcagggggaatggatgttttttatcatgatttcaatgtgatgaaatatgttccgaaaatcattgaaaatcttgcaaaggaacttggaaatagaattactgaaagtgtgacattgggacacattgaaaattacgaatcgatgtttactccccaacgcttcattgagcaaatcatggcgtttgaatacttgtttgaaaaattagaacccgaaaaggccaagcagcgaaatttccacttgattgatgaattggaactgatgctcggagtttttccagatgttattgctggagttcgtaaaagcacccgtaaaattgcggacgaaatcaaaaacttacgggtagatattgtacatgggcatgcatactattacgattttgccaatgatcacaatattcagtattatatgctaatgcttgataagttgattgaacgcatgaacttaaagcttgtaggttttaacgatgaggaaataaagactttttgctcttattaatggttgcttactattttctgcgctcatgcaatagaagtggccggtgacaaacatgaatcattaaaaggggcctcaccccctgcgccgcaatagacaaagaataagaaaatccctctgaaatcattgatttcagagggattttggtccgagtagagcgattcgaacgctcggcctcttgaacccaaatcaagcgcgctaccaactgcgctatacccggatatttgattttgaaccattatagcacaaaatttgtgcgattgaaagatttttccgtctgtggtcattcctgtggtcaaagccacttttgtgccgttttcggcaaccgggggaaatccagcaaacgcaggtgtcgcaaggctttgcggcgtttcgcctcaccctatcccggataccgccacggcacgccccaaaccaggcgcgataccaacttcgctatacccggatattcaatttctgccatgataccacggcgaacggtaaaaataaagttttttctgtctgtggtcattcctgtggtcaaagccgcttttatggcactttcggcaatcgggggaaatcccgcaaatgcaggtgtcacaaggctttccggcgtttcgccttgccccgccccggataccgccacggcactcccaaaccacccgcgctaccaactgcgctaatcccggatttttggttattgagttttacgccaactgtggtcaaatatgtggtcacggcgattttttgaccaccttagcttgcgggggaagtgcctttatcgcaggcgtatcaagggattgcgggcacggtattttccggcttgaagggggagcgacccgctcccaaaccaggcgcgataccaacttcgctatacccggatactattgatacttgaatagggcttcgatttgaagccctattattataccgcctgctctgcgcggttgcaagggttatttgcggtgcgcggagcgtttttcggcatccttggggcgcgtgcccttcatcgcctcgtgttcctgacggagctcgtcgtgcagctggagcgaactccacgcggcattgtcctcggtgacgacggccttgagcgcgacgaccacgcggctgcggcgaagagacgagagcagcgcgtcgagctgcggaccggaaagaccgcagagtacgagcatctcgtcggaaaagccgccctcgacggtttcctcgacaggggagaagccctcaagatcgcagagatagccgatcggctgcgaaagctcctccggcgcgacgatgcgcccgctcacaccgagcttgaagagcgcgaagcggaccttttgcagccgtgcggcgtccttgaaattgtaaagcagtgcacatgccatggtcaaaccctcctcagcggtgctgcgcggccttctgtgccatgatatcggggtcgatgcagaaataggtgaactcgcccgtggcgaggagcttgccgccctcgcctaaaatgtccacgttgacaaggcaggtcgttctgccgcggtggcggactttggcgtccgcgcgcacgacgccctccgactggttgcggagaaaatgcatcgagctgccctgcgtcacgtaggatcgaccatccgtgtgggcggcgtagcccgtggcgttgtcggccatcgtgtagatcgcgccgccgtgcacgataccgtagggattcttgctctcggggcggatctcaagcttgaagatcgcgtggtcgggctcgacaaattccgcttcaatgtgattataggtggcaaaaagattcttcttgttcaattccgccgcctgctgggcggctgtgagctgttccatgaaagtgctcctttgacattgttactgtcgtatcctaccacagcgcggcgacaaaagcaacaatgcggtgaaaaacatcgaatcagtaaaaattgacagaaaaatgcggatttgtataacattgtcattttagatgccaaaagtgaaaaaactcgtatcgcttgaccacttccattttgcttgaaagcctgctatactacctttaccatagaaaaatatgcgtttgaagggaaattccctatgatatatgagagtagtgcatcctcccgctgtgccgcggggccgaagatcgccgccatcggcggcggcacgggtctgtcgacgatgctgcggggattgaaaaaatatacagaccgcttaacggctattgtcacggtggcggacgacggcggcgggagcggcgtgctgcgccgtgaaatgggtattctgccgccgggcgacgtgcggcaatgtatgcaggcgctcgcgaacaccgagcctgtgatggagcagcttctcggctatcgctttcccgagggacagctcaaggggcagtcgttcggaaacctgctgcttgcggcgctcaacggcatggcggggagctttgaagaggccgtcgccatgatgggacaggtattggcgatctcgggccgcgtgctgccggtgacgaacgcggatgtacagctcgaggccgtgtttgaaaacggcgcgcgcgtcgtgggcgaatcgcacatcttcaacgcgaaaaagcagcaggactgccgcattgaccatgtttcgctcgtgccggagcacccgaaggcgctgcctgacgcgcttgaggccatttcagaggccgacctcattctgctcggcccgggaagcctctatacaagcgtgatcccgaatctgcttgtcaacggcgtggccgacgccatccgcgcatcccacgcgcagaagttttacatctgcaacatcatgacgcaggacggcgagaccgagggttacaccgccgccgatcatctggaagccctgcagcgtcacgggcggaaggggatcgtggacctctgccttgccaataacgcgcccatcccgcatgagctcgccgcgcgatacagcgaagaggacgcggagctgctgcgcatcgaccgcgagcgcatcgcggcgctgggaatcgcgctcgcggaatacccgctgctctcggcgcagggaggctacgcccgccatgaccctgagcttctggcgcgggcggtcatggagctgtatcgcgagcgcacggtgcgcatctaccgcggcacccagcagtacattacggaagaacaggagaggagataatgctcaacagtaaggaatttgtcagggaattgcagctgcgccacgagagcgcatggatgaacccgaatctcgagagcgcggacgccgcactcgctgcgctgccgctcacgcgcacggacgtcgacgatgccgaggcgcggctggagcgcttcgctccgttcatcaaaaaggtatttcccgagaccgcggctgatcgcggcctcatcgaatcgccgctgacggaaattgaaaacatgcgcgtgtggctcaatgaaaatgagggcgcgcagcttgcaggcaagctcttcttgaaacgcgacagcgacctgcccgtcgcgggcagcgttaaggcgcgcggcggttgctacgcggtgctcaagcacacggaggacttagcgcttgcgaaccggttggtcgaaacgcgagacgactacagcgtgtttgccacgcgcgcgttccgcgactttttctcgcagtatgagctgcacgtcggttcgacgggcaatctggggctgagcatcggcatcatgggcgcggcgctcggctacagggtcacggtccacatgagcgcggacgcgcggcagtggaaaaaggacctgctgcgcgcaaagggcgtaacggtgctcgaatacggcgcggactactcctacgccgtgcagaagggccgcgagcgcgcggcggaggacccgagaagctattttatcgacgatgaaaactctgtcgacctcttcctcggctacgctgtggccgcgcggcggctcaaggcgcagctcgccgagcagaacatcgcggtcgacgacgagcacccgctgctcgtttacattccctgcggcgtcggcggcgcgccgggcggtatctgcttcggcttaaagcaggagttcggcgacgcggcacacgtctacttcgctgagccagtggaagcgccgtgcatgctgctcggcctcgccagtggcttacagaatgcgatctgcgtgcaggatattggcctgacgggccacactgcggcggacggcctcgccgtcagccgcccctcaagatttgtaggggagacggtcaaggcgttggtcggtggcggtttcacggtgtcggacgagcatctgttcgccgaccttcacgccctgcgcgagatggagggactttttgtcgagccgtccgcttgtgcgggctttgccggtgcggtggagctgtccaagatgacggattatctcgaaagcagcggccttggcgcgcactgggagaatgccgcgcacatcgtctgggcgacgggcggcgcgctcgtgccggaaggcgaacgcgaaaagtacctcgcaaactgaaaagagataaaagaaggacttcacgcattgcgtgaagtccttcttttttgcgccgcggcggggaggggaaccccgttacgcgggcgtcatcgtcagggtatagttcgccgtgcggatcacgatctgtgttacgacgctcttcgctgtgtcgacgctgagctcggcggtgtagccggtgaagctgtcctccgcataggagacgtgcagcgtccaggtctccgcactgcccgcagcggcggtgcgcttgaagtccgtgatgtgtttgctgcgcgcacctgtgaactggcagtcaaggaagcatttgccgatgtagctattctccgcccatacagccacctcggcataaatcggatagccaacatcacctagttccgggctgttgccagagatgccaatctgttcatcgcttgcaaagccgcccttgacagcataataatttgcaaaaaaactgacaccgttattaaagaacgggaacggctcggcagtaaatttcacggtggtgacatccggtgtgctgctgacgtcgagcgcggcgtcgaagctcgtctttttgccgccgccttcgagcatgccgcggtatttgccgcccgcgaggtagctgttattgaggatcgtgagcgccttatcgagcgcggcgttgccggtgtcgggatcggtcggcaggcgggcgggagcggtggtcgtgtcaatacgcagaccgttttcagcgtcccactgatagctccaaccgaacgaatcgaccgcgtaggcccaggtgagggggaaataggtgatgccgttataattgaaaatgggatacttttcttccttgttattgatctgtgcgccgttgacgctaatcttgtagcttgccggtgtgacggcgacactgccgcgctgcgccttgccagtctcggcaacataggcgctctgcgcgccgcctgcggtgatattgagcgacttggcgacattgttccagttggtctccacgcccatgaaacggcttaattgatacgtcatgggaaagtaagtgatgttgctataggtcagcagcgggtacttggcgttcttgttgtcgatgacctggccgttgagcgacaccttgccggtgacgacgtcggcgcgcattgcggcctcggcctgcggcagcagactgaacgcgagcgcgatgcagcaggcgatggcaagcagggcgcgcagaaaagtcttgttgatggtagacataacatactcctttccgttttgtgatggttgacgtttactcgtacagcttggcgctgcggttgaggtacacgagctctatgatctcgaccacgcccagaccgatggcaatggcgagaatgagcagcagcaggacggtcaggctgccgttgtaaaaatagaagaaggaagccgacgacagacacaaaagcaggatcagaatgagaaatgcgccgagagcgccgatgaccacgacctgccaggtgcagagtgaacgccattttgccgccatcgcgtcgtctgcgccgtcaaacgcttcggcgcaggcggtgagctggtggtacgccgcaagtgtggcaaacaggaagatcaatcccagcagaatgatcagaacgaccagaatcgcggagacgtccgatgccgttatccactcctgtacgcttggcgcatcgagaagcgcaacgaacggcagcgcgatcagcggcagaagattaaagtacacggccttgcggaagcgggggacggccgcgctcagcttccagagcacaacgagcgcgagaatgctgaccgcaaacgacatcgcactcagtacaacgccgagcgacgggatcttgtcgccgagcttaaaggtgttgttcaaaagattgatgacgatattggcgatgccgaggcggaagaggttctggaaccccttgtgcagcagcggcgcgtttggcctctcgcgcagggggatgaccggcggcgcgggcgggggagtgacagcgctctctgcgggggcgggaacggcgacgggggaaacttcggggacaggtgcgggacttggcgtctggttattttccatcatggcgggtctcctttcttgttctctcgctttttatttctctctcaatttgaaatacggtcacgctcactggaagcggtatccctgcgcggtaagggaggcaaggtagttcataaagttttcgtactgctcaaagtgcagcaggtcgcttgcctcgacctcatggaacgaggcgattttagtggaggtatccacccacacaagataatcgttcacggtttcgcctcctcgtcggggagcttttccccctctatgtcatcaaaggtgagaatattctcgttttcatcgtcgtcggaaaggtcgacggtcttctccgtgaccgccacgctctcggccagagcgcgcagggcggcttcatcgccgctggcatcgagtgagaagtggagattgctctcctcgtcgatccactcgagcgtgctccacagcgactcatcgctcgcaaggaaaaacttgcccttgcagccgttgacggtgacctcggaaatttcggtgtcctcgcccatgtcgtaatagctgaacgaatcgtcctgcatgtagatatagctgaaaaggatgaggtcgttaccgctccgatagcagagctgacggaagccggagtcctcgtagctcatatcttcgtccagcgtgtaaccgtccggcagggcggtgatcgcgtagaacggcagctcaccggtgggggcgtcgcccgcgtattcataggagacctgcgagcccgtccacgtttccacccagtggatcatagcggcccgcgcggcgggactggcggcggcaaagccgttgagcgcgagcagagcgaccagagcgaccatggccgcgcgcttggcgagcttgctccagaagctccgctgcgcggggcgcttgtaggtcagggcctcttcgacgtatttcgcgccgatctcgttcatggcgtcggaaaaaagctcgggcgtcataccagcacctcctgttcggtcagataggtcttgagctgcttgcgcatacgcgtcaggcgcaggcgggcgttgccctcggtgatgccgaggagcttgccgatctcggcaaagctgtcggcgtaccagtagcggcgcataaagagcacacggttttccttgctctgcgtgtcaagaaagcgctcgattgcggcggcgagctctctggccgcatagtgctcctccatcgcctgctggggcgaagcaagaaacgtttcaagctcctccatgcacatatcgtaatggctgtttcgtttcattgccgtgttggcacgatagcgcgtgatcgaacagcggcggacgagcgtgccgacaaacgccggaagcgactccggacgctgcggcgggatcgcgttccaggtgcttaagtacgcatcgttcacgcactcctccgcatcctgcgcgcttgcaaggatgttgtccgcgagcttgtggcagagcttgccgtatttcttgtccagctcgctgatggcatcctccgagcgcgcaaagaacagctcgatgatctgcgcgtcttccatcgtgcagcgcctcctttcctcatgaaaaagtgtttctacctcaatagacgcaatttccggcaaaatgcttcacgaaaccgtaaaatttttttatttttcctttttgacggaaaaaccggatgatttgttcctgcgcggcgggagaaaaagggaagatatcgacaaaattttacctaatagataagaaaacggccccatgccgaaagcatggggccgttgatcctgcattcaaaggtgcagccttgcgtgctcgcagatcgcgtcgtatgtctgctggctgatgtcgtgctcgatcttgcacgcatcctcctcagcggtcttttcgtccacgccgagggcgatgagaaattttgtgagcgtgtggtggcggtcgagcatctttgctgcgatcgccatgccgcggtctgtcagcgtgatgaggccgtcgcggtccatctcgatatatccgttttcgcgcaggcgcttggtcgcgtaggtgacgctgggcttcgtcacgcccagatggtcggccacgtcgatcgaacggatatagccgtgctgctctttcatcatcagcatggattcgagataatcttcagatgccttttggattttcatgtgcggtttcaccaacttcgcaataaagtacgataataggttaacatgctctaacaaaaaatgcaagcattaaaaaaatgttcacaaaacctcttgacaaaataggttagagagattaaactaacgggcgaaagttaaacggcactaacttcgaggtggcgaattgcggatcgccgcgatgagaaaagtgccagaccaacagcatgcggagggataaataatgatgccgcttacactggcgaatgccggagaagaaaataccatcctcaaagtcggcgggagcgctgaagtcaaaaagcacctcgaagatctcggctttgtggccgggggcacggtgagtatcgtgtcgtcgctcggcgggaacgtgatcgtcaaggtcaaggaagcccgcgttgccattagtgaagaaatggcaagaaaaatcatggtttgagcaatttttcaaataaaaggagagagattatgaaaacactgcgtgaagtcaagatcggcgagaccgtcaaagtcgtcaagctccatggcgagggccccgtcaagcgccgtatcatggatatgggcatcaccaagggcactgaggtgttcgtgcgcaaggtagctcccctgggcgacccgatggaggtcaccgtgcgcggctacgagctgtcgctgcgtaaggcggacaccgaaatgatcgaagttgaataatttatttctacataagttaaggaaacttaacaagaaggagcagtaagaaacatggaaaagcagatcaaaattgccctcgcgggcaaccccaactgcggtaagacgacgctgtttaatgcgctgaccggttcgaaccagttcgtcggtaactggcccggtgtcaccgtggaaaagaaggaaggtaagctcaagaagcacgatgacgtggtcatcatggaccttcccggtatttactccctgtccccctacacgctggaggaagtcgtcgcccgtaactacctcatcaccgagcgtcccgacgcgatcctgaacatcatcgacggcacgaacctcgagcgtaacctgtatctcaccacccagctcactgagctcggcatccccgtggtcatcgccatcaacatgatggatatcgtccgcaagaacggtgatgagatcaacgtcaaggagctctcccgtgagcttggctgcgagatcatcgagatctccgcactcaagggcgacggcgtcatggacgctgccgaggctgccatccgcgccgccaagggcaccaagaccgtcccgatgcacaccttctccggccctgtcgagcacgccatcgcccacatcgaagaggcggccgtgcactccatgccggaagagcagcagcgctggtacgcaatcaagatctttgagcgcgacgacaaggtgctcgcaaagctcagcatccccaccgagacgatgaaccacatcgaagaggacatcaaggcggcggagaccgagctcgacgacgatgccgagagcatcatcaccaacgagcgctacatctacatcgcacagctcatcaagggctgctacaagaaaaagagcacggaaaagctctccacctccgataaaatcgataaggtcgtcaccaaccgctggctgggcctgcccatcttcgcggtcgtgatgttccttgtgtactgggtcgctatggtcggcgtgggcgcgcccgcgaccgactgggcaaacgacggcctgttcggcgacggctggcatctgctgggcatcggctctgccgcctacggcgaggcgagtgacgattacaccgccgcgaccgaagcggctgacgcgttcgtcggcctcgacatggaagacgagagcttcgacgccgacgcggcgctcgaagagctcaaggccttccagcccaccgaagacactgccactgttgatgttgaggatgaagagaccctcgccatcaatgagatgaccgcctactacgacgcgctgcccgagggcgcggacaagatggacgatgttgtccagatgacctatgtggatgctgtcagctacttcgaagagaacggctttgacgagcccgacccggctgactacggcgtttgggtccccggtatccccgttctgatcggcgatgcgcttgacgctgccggtacggctgactggctcaacggcctgatcctcgacggtatcgtcgccggtgtcggcgcggtgctcggcttcgtgccgcagatgctggtcctgttcctgatgctcgccttcctcgaggcctgcggctacatggcccgtatcgccttcgtgctcgaccgtatcttccgcaaattcggcctgtccggcaagtccttcatcccgatgctcatcggcaccggctgcggcatcccgggcgtcatggcctcccgtaccattgaaaacgagcgtgaccgccgtatgacgatcatgaccaccacgttcatcccctgcggtgcgaaagtgcccttcatcgccatggtcgccggcgcgatcttcggtggtgccgcatgggtcgctacctccgcctacttcgtcggtatggctgccatcatcatctccggcattatgctgaaaaagacgaagatgttctccggcgatcccgcccccttcgttatggagctgcccgcctaccactggccgaccgtcggcaacgtgctgcgcagcatgtgggagcgcggctggtccttcattaagaaggccggtaccatcatcctgctttccaccatcgttgtgtggttcaccacctacttcggctgggtggacggcacgttccagatgctctctgaggaacagatcgacgcctccatcctcgccaagatcggcaatgccatcgcatggatctttgcgcctctcggctggggtacctggcaggcggctgtcgcctccatcaccggccttgtcgccaaggagaacatcgtcggcaccatgggcatcctgtatcccgccggctgggctgagatcggcgcggccttcacgcagatcagcggctattctttcctggtgttcaacctgctgtgcgctccgtgcttcgcggccatcggcgcgatcaagcgtgagatgaacaacgccaagtggacctggtttgccatcggctatcagtgcggctttgcttacctcattgccctaatgatcaaccagttcggcaacgccttcaccggcagcctgaacgtcatcggactgatcgcggccatcgttgtcctcgccggtatgatctacatgctcttcaagccctataaggaagctaccaagctgagcgacaagcactaatcccttaacaccgataccctgcgaaaggagtgatttccatgttgaactgggttaccgcaaacctgtcgacgatcatcgtctctgctatcctgcttgccataatcattgctatctccacctatcttatccggcagagaaagaggggaagaaactcctgtggctgtaactgtgcacactgcgctatgcacggcacttgtcacagtaagcagcattaaatagcacaggagacgcgggacttatccacccgcgtctcctgcgccgtatgaaaggaaatgatcttaacatgtacgaaaccaaagtgaagatcgacggcatgatgtgcggcatgtgcgaatcgcacatcaacgacgccatccgcaacgcgttctccgtgaagaaagtctccgcctcccactccaagggcgaagcggacatcatcagcgaagagcccatcgacgaggcgaagctgcgcgaggccatcaccaagaccggctatgacttcgtctccatgacgagcaagccgtatgaaaagcacggcctgttcggctttctgaagaagtaaaagacaaaatgaaaggcacggcttttgccgtgcctttttttgacttagttctgcgcttcggcgcgcttcccgcggtgcgggcttttcaaaaagtcgacgagcttttgctccatgcgggagagctgctgcgatttgagcgtgatgagatagatcgtgcgcttgagcgcgcttttgtccatctcgaaggcgagcagcgtgccgttttggatctcctgctccacggcgagcgccgagagcacggcaacgcccacgccgccggagaccatctgcttgatggcctcgggatcgtccacgcgcgccacgacatgcagcatatcgtgggagaggccgagcgtgcgcagatagttttgcaggctcgtgtccgtgccagagccctcttcgcgcgagacgaacggctcttcgagcagcagctcgcggccgtagacgccgcgctctctgaacgcgcggtagtgctcgttgttcggcgcggcgagcacgagcctgtcgtcgtagagggggaagtagtccacattttccggctcactgaccgcgccgacaaagccgacggcgatctggccggatttaagcatccggtgcacctgctcgctgtcgccgcggcgcagagagtagcggaactccggctcgcgcttcaaaaacgcggcgaggtagcccggcaccagatattgccccggcacggtggacgcgccgagcgcgaccacgggggcgctgtccgcgtcggagaacagcgtgcgcagcgcggcgcagtcattcagaatacgccttgcgatggggtagacctgctcgccctctttcgtcagacgcacgtggcggcggttggagcgcacgaagagctccttgccgagcgcctgctccaaaagcgaaatgtgcgcgctcacggtggactggttgaagaacagctcctccgccgcacgggtgaagccgccgtattccacaacggcgacaaaaatttcaagctgcttgaggctgatatcgttcataagacgggtttcctccggaatgtcgttctactttgaaaagaataatatgagaggacgaaaaaagcaaggcgtttcatcgcttttttcaatgataaactgtattttatgaaatacaggcgatggatcgcgcgctcttgcaatttgcggaggagtttggtatcatggcaggcagatcaaaagaaaaacggcggtgatgataagatgaaaacagcgcttgtgacggacggaaaataccgctcgtccatcgcggcggtgcgtgcgctgcaccgcgcgggctaccgcgtggtcgtgacgcagacaagggcggacgtcaagagcgcacccgcagtgtcggtgtcgaagtcctgcgatgatttccgctggatcgacggcgcgtgcgcggatgcggattacgccgaaaaactgctgagcatactcaaagagtatgagcatccggtgctattttgcgtcggcgcggtgacgctcaacaccgtcgccgcccgtcgggaggagtttgccgcgctggcgaacttcctcatcgcgccgaaggagacgctcgacgcgctcaacgacaaggagagcgtgcatcagcgcgcgctggagcttggcattcctgtgccgcgcgagtacgacggcacgccggagagctatcccgtcgtcgtcaagccgcactgcggggagaagttcggtctcaaggctgccgaccgctacgctgtggcgaacaacgaggcggaattcaacgccatcatggaaaagatgcagcgctacgacccgagccccatcgtgcagcagaagatcacgggcgcgggcgcgggcgtgagcctgctgctcggccgcgagagcgagctgctcggcgcgctgtgccaccgccgcgtgcgtgagtatccgatcacgggcgggccgtcgacctgctgcgagagcttttatgatgaaaaaatgatcgacgaggcgtacaaacttctcaagtcgtttcactttacaggccttgcgatggttgaatttaagggcgactgcattttagaggtcaacccccgcgtgtggggcagtttcccgatgacggaggcggcgcaaagtcccatcgtcgcgcactacgcgcaggccgcgcagggcgggcaagtcacctacacggcgaaggactaccggacgggtgtaaaaatgcgctttttcctcaacgacacggtcgctgcactgagctatctgaaggcgggccgcgtcaaggagggcctgcgcggtctcggcgatttcttcacggcgaaagaggccttgagcgccaagggcgatggcaaggtcatgcgcgcataccttaaaaagagcctgtttgagcgctgagaagggggagaggatcatggagctgcggctcgatctgcacattcattccgagcggtcgttcgacggctgcatgagcctgagcgagatcgttgcgcttgcgcgcgagcgcgggctgaacggtgtcgccatttgcgaccacgaccgcgtgctggacgaggttccggaattcgacgattttctcgtcatccccgcgaccgaggtttcgaccgagcgcgggcatctgctgggtctctttgtgagagaacccatcgaaacgaggaagttttccgagtcggtcacggccattcacgcacagggcgggctggcggtcatcgcgcatccctttgagcacagcacagacgcgaaccggctcggcgatgtgatgagccggcttgacggcgtcgaaatctggaacagccgtgccgaccgcaagaacaagagcgccaacgccatggcgcgcgagctggcgcaaaaatggaaaaaacccgtcactgcgggcagcgacgcacacgtgccagaagaggtcggcggcggcgtgacggtgctggaagcggacgagctgtcactttccgccgtcaaggcagcgctcctgcggggcgcgaagcaggtcgaaggccgccgtggccgcgcaatgtgcgtagcgagaagccagaagaccaaaagagagaagacaaacgcaggcgtaaaaagacgggtaaatggaatgctctttacagtaaaatgcgccttgcaggactttaccaccagggaggatggatggcatgtcatggatcgttaaactcggcaaaaagggaaagaagatcgtcaagaagatcatcacgcccgcggaaaagcactacgtcggctacacgcgccgcatcgagcgcgtgaagacgggcgagcgtatctgcgcgatgacgttcgacgacggcccgatgggccttcctgcatcgcccgaccgatttgtgggcaaaacgctgacggatgtgctgctcgacacgctcgcgcagtacggcgcaaagggcagcttcgacgtcatcggcgacacgagcgagaactaccccgacgaggcgggcaagctcggcagcgcggcgtggggcggcgtcaaattcgaccactaccccgatatccactgcgacgacaagggcggagccgtgcacaacgaccgcctgatccgccgcatgctcgacgagggccatcagatcacaaaccacggctaccgccacatcatcttcggcaaaaagccgtttgtctacggcgcgcgcgagtacctgcctggctttgacgccgcggtcgcggacctgacgcgcctcgacacgctgatgcgtgagcgctacggctatacgctcacgctcgcgcgcccgccgcactatgtcgacaagatggcgggcggcttcacgagttacgacgtctacgagcgcatggggtaccagtatatggccgcgtcgttcgacggcgcgggctggctgccctcgacgcacgaggaccctgaggcggcgcttcaggcggagatcgacgcgatggtcgagccgatgcgcaaggcgctcgaaaaggacccggacttcttctgcggacagatcatcttccagaaggacggctacaacatggccaagcgcacgccggtcgcgttcgctctgggcaagcaactcgagctcctcaaggagtacggctaccgcgtcgtcagcgtgggcgagctgatggaggagagcccgttcacggacgtcgggcgcgacgatccgctgtttgaaaagctcgtcgcgcttgcaaagacgcgagccatcgtcttcacggacaacaagctgcgcctcgacgataaaatgaccgtcggcgagctcgcgatgctgctcgcgccgcgcgacgaggccatctcccgccgcgttgcccagctgcgaaagaccggcaaggccggcccttacgacggcgcaatgtcctactgccgcgaaaacggtctcatcgacgcgagcaccaaggccgaggacgccgtcacaagactgccggacgccatgttcgacaaggcaactgactttacaagaagaaacgtctacgcggcatataaaatggaagaataaaatggcctcaagtacctccgctacatggcggaggtatttttttctcctcgtccacataggctatggcagaaatggacgggaggcgggcggcatgaagaagcggcggcagtggacaacatacagcgggagcgggaagcgcgttgcgccgcgaacgcgcacatcgcgcgtgtctcgcggcaaggagatgggagtgccgcggctttgggtgcagctcatcgtctgcggggcgctgtttgtggcgctcattggcctcaagctgctgatgccggggaacttaagcgcgctgcgcgggacgctggggcagtggctggtgcgcgacgcggacttcatctcggcgttttccgcggtcgggcgtgcggcatccggcgagcaggactggggcgattcgctgtcggaggcctatgtcgcggtgtttggcggcgagagcaaggcgcaggaggtctcgggcaatctgatcggcatgacggtctcggagcaggacgtctccgacctcacgagcgcgcgggagctgcccgcactcgccgtgggcgagcagcgcattttaggcttttcgtacacgacgccgctgtccggcacggtgacatcgccgttcggctggcgcgacgacccgaacggcgcgggcgagtgcttccattacggcatggacatcgcgggcgaggagggcgcctctgtcgcctgctttgccgacggcaccgtcggcacggtgggggagagcaatatcctcggcaactatgtgacggtcaaccacgagggcggattttcaacgctctacgcccattgcagcgccatcaccgcgagcgcgggacagagtgtcaaaaagggcgatgcgatcgctaaagttggctcgaccggcaacgccacgggctcgcacctccactttgaggtgcacgacggggaagagtatctgaaccccgtttactatgtggttccctgaatgcgggctccacgtttcgtggagcttctggctgctcattctgctcgcggccatcgtgagcccgctgacgatcgtgctctcgattttgctggctgccacgctgcacgagtgcgggcatctgctggcgctgcgggcgtttcatgtgcccatcgaagggctgcggctcagcgcattcggcgcggtgctgcacgcgcgcggagcgcaaaggctctcttacgggcgtgagcttgtcgtcacgctcgcgggctgcagcatgaaccttgtctgcggcgttctgacggcgtggttttcgctgcactatgtgtgggtggagggcttcgtcttcgctggcgcgcacattctgctctgcgcgttcaacctgctgcctatcccgccgctcgacggctcgcacgcgctgaatctcgcggtctcggcgctgtttggcccgctcgtgggcgacgcggccgcggcgcttgcgggcgtcctctgttcgctcgcgctgctgggcggggtagtgtatctctatgtgcagacgcgcggcggcgcgctcgttatttttgccgcactggcactgcttttaagcgcgctcaaagaactgagacttgcgcgtcgcgcaataaaagtgtagaatagccgaaaatggatgtttgtgcccattttcggctttttatttttgcttacttcagaggagaacttttgtggataagagattggaacgcattttgccgcgcgtgcagaagcccgcacgctatgtcggtggggaattcaatgccattatgaagaataaaagcaaggtcgacacgcgcgtcgccttctgctttcccgacacgtatgagatcggcatgtcgaacctcggcatgcgcattctgtacggtgtgatgaacaatattgagggcgtgtggtgcgagcgctgcttcgccccctggggcgacatggagcaggagatgcgaaatgcgaacatcccgctctatgcgctcgaatcgtttgacccgatcaaggattttgacatcatcgccttttccattggctatgagatggcgttccccgcgatggtcgacatgctggacttagcaggcgtgccgctgcacgcgagcgaacgcacggcgctcacaccgctcgttgtcgcgggtggcacggcaatgtacaactgcgaacccatcgcggattttatcgatcttgctcttatcggcgagggcgaggagatggatgtcgagctcatcgagctgcaccgtcaggcgcggcgagagggctggagcaagcacgagtttctcgtgtgcgccgcgcagatcccgggcgtctatgtgccgagcctttacgacgttgcctacaacgacgacggcacggtcaagtccatcacggcaaacgagggtgcgcccaaggtcgtcctaaagcgcatcatgcgggacatggacaaggcctactatccgaccaagaccatcgttccctcgaccgagatcgtgcaggaccgtgtgtcgctcgaactgtttcgcggctgcatccgcggctgccgcttctgtcaggcggggtatgtctaccgtcccgtgcgcaaccgctcggaggagctgctgcgcggctacgccgttgaagccgtcgaggactcgggctatcaggatatgacgctctcgtcgctctcgacgtccgactacccgcaccttgtcgagttgtgcgacgacttagaggacttctgcgcccagcggcacgtgacgcttgcgctgccgtcgctgcgcgcggataacttctccatggcgctgatggagcggctgcaaaagggcagaaaaacgggcctcacattcgcgcccgaggcgggcacgcagagattgcgcgacgccatcaacaagaatctgacggaggaagatctgctcgaatcctgccgccgcgcgtttgcgggcggatacagcgcggtcaagctctacttcatgctcggtcttccgaccgagacggacgaggacgtgctcggcattgccgacatcgcggcccatgtcatgcacgcctggcgcgaaagcgcactcaacaagacgcgcggcgtgcgcatcacggtgtcgacctcgtggtttgtgccaaagccgcacacggcgttccagtgggagccgcagatccccattgaagagtacgagcgccgcgtcaagctcctgcgcgaggcgatgaacaccaagtccgtcacgtacaactggcacccctcgcccacgagctttatggaggcggtcatctcctgcggcgaccgccggctcggcaaggtcatcgagaccgcgtggcgcaagggtgagacgctcagcgcgtgggaggactattttgatctgaaccgctggatggaggcctttgaggagtgcggtcttgacccgcacttttacgccaaccgccgccgcagcgaggatgaaattctgccgtggagcatgatctcctgcggcgttgcaccggggtatctgaagcgcgagcacgcgctgagctatgagggtgtgacgacaccggattgccgcacgcactgcaacgcctgcggcgcaaactgcctggtgggagggaaatgcgatgtctaaattgcggctggtttttgtcaaggagcatcaggcgtcctacatttcgcatcttgacgtgatgcgcacgttccagcgcgtgttcccgcgcgcgggcctttctatcaagcactccaacggcttccacccgcaccctattttgtccatcgtgctgccgctgcccgtggggcagtcgagcgactgcgaaattctggactttgaaagtgtggaggacagcacgggcgagggtgtggccgaggcactgaacaccggtatgcccgcaggtcttcgcgtgctggactgctatagcgtgacgcgccccgtgcgcgagatggtcaacctgcgcgcgcagctcgaaatggagtacgacaacggcgtgcccgagggcgcgtgtgagcgcatccgcgagtttttcacgcaggaggagatttttgtcgaaaagcgcacgaagcacaagggcatgaccgagctcaacattgcgccgctcatccgctcgctcacgctgacggagggggagggcgtgatcctcgccgatgcggtcgtcgccgcgcaggacccgggcctcaaccccgcgctgatcggcgcggcggtcgcgcggcacctgccggagatcgcgccggactttgttcgcgtgcgccgaaaagaggtctacgacgcggaaatgaacgttttccgctgatttctcccgtgtttttgcaaataatgcttgcattcccgttggggatgtgatatgctaccatagcttgaaaagggcggtcctctgccgtgcgcgggtgaaagagtcccgacagcgccgaagaaaagcggtcaagaacgcctataaataggaggaaaatatccatggatctcatcaaagagctcgaatcccagcagctgaaaaaggaaatgcccgtcatcaacgtcggcgataccgtccgcgttcatgtcaagatcaaggaaggctcccgcgagcgtatccaggtcttcgagggcatcgtcatcgcgaagaagcacggcggtcttgaggagactttcaccgttcgtcgtcttgcctacggcgtcggcgtcgagaaggtgttccccatccactcccccctcatcgagaaggtcgagaccgtgcgcagcggttatgttcgccgcgccaagctgtattacctgcgcggccgcgtcggtaaggctgccaagatccgcgagaagctgtaaggcagattctttgagaacaaaaaagcatggcgtttccgccatgctttttttgttgcctttttcaaaaagcgtgctacaataatacattagaaaatcaggcgcattttgccgcagagagagactgttagtccgccgctgcgcggcgctgggtttaggagaccgaaatggacgaatttgatcagaaaatggagatcagcgagcagccgcaggaggagatcgtggaaaagatccccggacgcgacgtgtatgagacggtctcgtctctcgtctcggcgctgctggtcgttgtgctggtgtttacgtttcttgtgcggctgatgggcgtttccggcccgtcaatgatcccgacgctgcaggacggcgaccggcttctcgtcgtcaactcgctgctctgcggcgactatcaggtcggcgatatcgtcatcgcgcgcaaggagacctttgactcgaagcccatcgtcaagcgcgtcatcgccaccgcgggccagaccgtggacatcgactttaacttgggtcaggtctatgtggacggcgagcttctggacgaggactacatcaacgactacacctatcgcgaagagggcaccgtgttcccgcttaccgtgccggagggcgaagtcttcctcatgggtgacaaccgcaaccattcgaacgacagccgcgattcctcgctcggcacggtggacacgcgccttctgatcggcaaggcggtgttcctcgtcttcccgggacgcgactatctgaccgagcagcgcgagtttggccgcatcggtcttctaaagtaaagggggactgagaaaatgcagttggattctctcagctggttcccgggacatatgaccaagacccgccgtatgatcacggcggaactcggcaatgtggacgctgtgtgtgagattttagatgcacgcattcccatgagcagccgcaaccccgatgtggacgagctgacagcgggcaagccccgtttgatcgttttgaaccgcgtcgatcaggctgacccggaaatgacgaaaaaatgggcggcgtatttccgctcgctcggctgcgccgtcatcgaaacggacgcgaagcagggcgggggcgtgaagcagttttcttccgccgtgcgcacgctgctgcgcgataagatcgcctcttacgaggccaagggccagatcggccgcgtgctgcgcgtgatggtactcggcatcccgaacgttggcaagtcgacgtttatcaacaaggtctctggccgcaagagcgccaaggcggaggaccgccccggcgtcacgcgcacgaagcagtgggtgccggtcgacaagacgcttgagctccttgatacgccaggcatcctgtggccaaaatttgaggacagcagcgtcggcgtgcgtttagccttcaccggcgcgattcgcgacgaggtcatcgacatcgaagagctcgccatgcgcctgatggattacctcggcaagaattatcccaaggcgatcaaggagcgctataagctcaccatctccgaggaggacgacggctatgcactgcttgagaaagcgggacgcaagcgcggatttttgatctccggcggcgaggtcgacaccgagcgcatgagctgtatcctgctcgacgagttccgcggcggcaagctcggccgctttacgcttgaattcccgccggagggcgaacgcacatgagcgtcaacctacactacgaggacaaagcccgcgccgcgggcttttcatccgtctgcggcgtggacgaggcgggcgcggggccgctgatgggccctgtatacgccgccgccgtcatcctaccggagggctgtgagatcgaggggctgaatgactccaagaagatgacggagaaaaagcgcgaggcgctgtttcccgtcatctgtgaaaaagccgtcgcctacgccatcgcgtccgtcgacgagaaggagatcgacgcaacggatattttgagcgcacgcatgaaggcgatgcagctcgccatcgatgcgctgcaaatcccagcggactatgcgctcatcgacggcaaccgcgaccacggcgcgtcggcaaagatcaccacgccgcacgagaccatcgtcggcggggacggcgcgagcttatccatcgccgcggcgagcgtgctggcgaaggtcagccgtgaccattatgtggtcgaagtgctcgacccgatgtatcccgagtatcagttcgccaggcacaagggctacggcacaaagctccactaccagatgctcgatcagtacggcccgagccctgtgcaccgcatgacgttcctcaaaaagtgggaggcgcggcgatgagcacgaagcaggacggcgactggggcgaggcgctggtcgaaaagtatctgagcgagcgcggctgccgcatcgtggaacgagagtggcgctgccgcttcggcgagatcgacctcatcgccgagaaggacggcgtgctgctgttcgtcgaggtgaagctgcgcacaaatttgcagtacggtgcgccgcgcgagtacgtcacggtgaaaaagcaggaaaagctgcgcgccgcggcgcttttgtacttgagcgagcgcgagctggatgtgcccgcccgcttcgacgtggcggaggtctacaccgatgtgcgccatagcgcgggcaaaacgcgcatcgcctacatcgaaaacgcattttgatctgactttgggagggaggcacgcgatggcattatacgcgatcggcgacctgcacttatcgctcggtacgaacaagccgatggatgtgttcggccccaaatgggcgaactatgtcgagcgcatccgcgaaaatttttcgcacctcagtgacgatgatgtcatcgtgctggcgggggatatctcgtgggggatgtcgcttgagcagtcgctgcccgattttcaattcatcgatgcgctgcctgggaagaagctccttttgaagggcaaccacgattattggtgggggacggctgcgaagatgaaaaaattctttgctgagcatgatattacgaccctcgatattctctacaacaacgcctttttctacggcgaccacgccatctgcggcacgcgcggctggttttatgaagaggacgccgcggggacgcacacgggcaagatgctcgcgcgcgaggcgctgcggcttgaagcgtcgctcaaggcggcggaggggaagcccatctactgctttctgcactatccgcccatctatcagggctacaagtgtcccgagatgctcgagcttctcgacaaatacgaggtcgagcgctgctattacgggcatctgcacggctacacgcaccgccgcgcgttcgaggggatgcgcgaaaaaaccgaatatgcgctgatcgcggcggattatgtcgcctttcagcctgtaaaaatttgcaattaagacataaattgatgcaaaaaagggtggaaattttgaggaagctatggtataattccactttgcaaaagcatcattatctgatgttaaacggaggaaaaagaaatcatgactgtcaaaaatgttgaaaagctggaaaagagcagagtcgcggtgaccgtcgaggtcggcgcggaggaatttgaagccgccgttgccaaggcctacgccaaggctcgcaataagctcagcattcccggcttccgccccggcaaggccccccgcaagatgatcgaaaagctctacggcgcgggcgttttctacagcgatgccgttgacatcgccctgcccgaggcatatacgcaggccatcggccagagcggcctcgatgttgtcggctatcccgagatcgagatcgtggacgacaagatcgacgagaacggcttcaccttcaaggcgaccgttgccgtgtatcccgaggtcaagctcggcgagtacaagggtctgacggctgagaaggaagagatcaaggtcagcgccgacgatgtcaaggagcgcctcaatgagatggccgagcgcaacgcccgcctcgtctccgtcgaccgcaaggccaagaagggcgacatcgccgtcatcgacttcgagggcttcgacaacggcgaagcgttcgagggcggtaagggcgagaattacgagctcgagctcggctccggcagcttcgtccccggctttgaggatcaggtcatcggcatgaaggccggcgaagagaagaatctcgacatcaccttccccgaggattatcacaaggacctcgccggcaagaaggtcgtcttccacgtcaaggccaaggagatcaagtgcaaggagcttcccaagcttgatgacgacttcgccaaggacgtgtccgagtacgacacgctcaaggagctcaaggacagcatcaagcgcgagatcaccgagcagcgcgagcagtccgccaagtatgccgtcgagaacgagctgatggagaaggtcgccgcgaacatcgagtgcgacatccccgatgcgctcatcgatgagcagtgcgcccgcttcctcgaggagttcaagcagcgcttacagtctcagggcatcccctatgaccagtactgcaagatgaccaacatggatgaggccaagttcctggaggagggcaaggagcccgcgacccgtcaggtgcgcatggacctcgccgtgaacgccatcatcaaggaagagaagctcgaggccaccgacgaggaggtcgaaaagcagtacaacgaccttgctgagaagtacagcatggacgttaacgagctcaagaagtatcttgacgccatgtccgtccgcacgcagatcatccgcgacaaggccatcagcgtcgtcgtggacagcgcgaagatcgaaaagaagaaggctcccaagaaggaagccgagggcgaagccgctgaaggcgaggaaaagcccgccaagaagaccgctgccaaaaagtccgccaagaaggaagaagaaaaggctgaataatcggcaaagcggccataatagatagaaacgacgatcaaccacaaatgcctgccatttgtggttgattgtgtacataccaattttttgaacagggtatgaacaaggaggttaccaagatgagtttagtcccttacgtcattgaacagaccaaccgcggcgagcgctcttacgatattttctcccgccttctggaagaccgcatcattttcctcggcgaagaggtcaacgatgcgaccgcgagcctgatcgtttcgcagcttttattcctcgaggccaaggaccccgacaaggacatccagctctatatcaactcccccggcggcagtgtgacggccggcatggcgatctacgacacgatgcagtatatcaagtgcgacgtgtccaccatctgcgtcggcctcgccgccagcatgggcgcgttcctgctctcgtccggcgccaaaggcaagcgcattgcgctgccgaacgcggagattatgatccaccagccctccgccggtacgcagggcaaggtcacggatatggagagcgacgtggagcacttcctgcgcatcaagcagcgcttgaataagatcctggccgagaacaccggcaagacgcccgagcaggtcaagctcgactccgagcgcgaccactggatgacggcggatgaggcgcaggcctacggccttgtggacaaggtcatttacaagagataaggacagtttgacttatgagtgaagataggaaaaaagagcttcgctgctcgttctgcggcaagagcgagcacgaagtgcaccgcatgatccaggggccgggcgtgcgcatctgcgatgagtgcgtccgcctgtgcatggacgtgctggaggacggctatgagccgcacgacgagctggaagcgcccgactccatccccacgccgcgcgaaattcgcgaggtgctcgaccagtatatcatcgggcaggaggcggccaaggtcgcgctgtccgtgtccgtctacaaccactataaacgcatcttcttcggcggcgacgacgaggtggagctgcaaaagagcaacatcctgctcctcggccccaccggcagcggcaagacgctctttgcccagacgctcgcccgcattctgaaggtgccgttcgccatcgcggacgcgacgaccctcaccgaggcgggctacgtcggcgacgatgtggaaaacattctgctccgcttgcttcaggcggcggattacgacgtggagctcgccgagcgcggaatcatctatgtcgacgagatcgacaagatcgcccgcaagagcgagaacacctccatcacgcgcgacgtctccggcgagggcgtgcagcaggcattgctgaaaatcgtcgagggcacggttgccaacgtcccgccgcagggcggccgcaagcacccgcatcaggagttcatccagatcgacacgcacaacatcctcttcatctgcggcggtgcgttcgagggcatcgagaagatcatcgagagccgtctcgaccgcaagtcgatgggcttcggcgcagaactcaagagtaagaacgatgtggacgagagcaagattttacgcgaggtgcagccgcacgatatcttgaagttcggcatcatccccgagctggtcggcagactgccggtcatcacggcgctcgacgcgctgacgcgcgacgaccttgtcaagatcctgacccagccgaaaaacgcgctcgtcaagcagtatcaaaagctgttttcttacgacgacgccgagctcacgttcgagcccaaggcgcttgaagcgatcgccgacaaggccatcgagcgcaagatcggcgcgcgcggcctgcgcgcggtgatggagggcctgctgatgaacgtgatgtacgacatcccgtccgaccgcacgatcgaccgcgtgaccatcacgccgggctgcgtggaggggacggaacagccgaaaatttcccaccgcacagagaaagaaggggaggtgccgcagccgtcgctgccggcagactccgcttcataaggagaaaccccatggaacctgtaacaaaaaatcttccggtcatcgccatgcgcgggctcaatgtgttcccgcgcatgaacacgagctttgacctcgagcgtccgatctccgtgcacgcgcttgagcgcgccatggaaaacggggaggagatctttctcgtcacccagcgtgagatcggcgtggagcagccggaggaaaaagacctgtacgagatcggcacggtcgcgcgcgtgacgcagatcttgcgcgtgtctgaccgcgtgctgcgcgtgatgatggagggcgcgtgccgcgcccgcctcaagcggctgtggcagcgcgagccgtttttgcaggcgcaggtcgagctcatcgacgagccggccacctcctgccatagcaagcggacggaagcgatgctgcgccagacctacgccagcgtgacggaatatgccgagctcgcgcagaaattgccggacgatgtctacgccgccattttgtcgacgaacgatcccggctatctggccgattttattgcccagcagctcaacctgcgctatcaggacaaacaggatatcctcgacgagctgcgcccgctgccgagattgcagcgcatgaacgagattctgcgccgcgagatcgaagttaccgccatggagcaggacattgaaagtaaggtccgctcccgcgtcggaaaaattcagaaggattttgtcctgcgcgagcagatcaaggtcttacagaacgagatcggtgagggcggggaggacgaagaactcgacgagtaccgcgagaagatcagcaaggcgcacctgagcgaagaagtggagcgcaagctgctgaaagatgtggacaagctcgccaagcagccgttcggcagcgccgaagcgagtgtgctgcgcaactatctcgacacctgcatggaaatgccctggggcgaggagacgaaggagcgcgccagcgtagacgccgcgcgcaagattcttgaccgcgaccactacggcttgcagaaggtcaaggagcgcattttagagttcatcgccgtgcgccagctcaaccccgaggcgaaggggcagattttatgtctcgtcggccctccgggcgtcggcaagacgtcgatcgcgctgtcggtcgccaaggcgatgaaccgcaaggtcgcgcggctgtcgctcggcggcgtgcgtgacgaggcggatatccgcggccaccgcaagacctacatcggcgcgatgcccggccgcatcatcgaggctatctcccgcagcggttcgatgaatccgctgctcgtgctcgacgaggtcgacaagatgggcagcgacgggcgcggcgaccccgcgtcggcgcttttagaagtgctcgacagcgaacagaattatgccttccgcgaccactaccttgaaattcccgtcgatctgagccgcgtcatgttcatcatgacggccaacacgcttgacaccattccgcgtccgctgctcgaccgcatggaaattattgaaatccccagctacacggacgaggagaaggtgcagatcgcgcagcggcacctgctgcccaaggaacgtcaggcccacgggctgacagcctcgagcctgcgcgtggacgagagcgccatccgcgcggccatcgcgcgctacacgcgcgaaagcggcgtgcgttcgctcgagcgccagctcggcaaaatctgccgcaaggcggcaatgcagcttgctacaagcgatgtaaagcgagtcaccgtgacagagaagaacatcaaggacttcctcggtgcgccgcgtgctgcacaggagaagattcccgaaaaggaccttgtcggcgtggtgaacggccttgcgtggaccgaggtgggcggcgaaattctgcccgtcgaggtcggcgtgatggatggcagcggcaaggtcgagctcacgggcaacctgggcgacgtgatgcaggagagctgccgcgcggcactctcgtgcctgcgccagcgggcgcaggagctcggcatcgcgccggacttctacaagacgaaggacatccatatccacttccctgagggagccatccccaaggacggacccagcgccggtatcgccatcgcgacagcggtgctctccgcgctgacggggcaggcggtacaccgcgatgtcgccatgacgggcgagatcacgctgcgcggccgtgtgctcgccatcgggggcttgcgcgaaaagacaatgggcgcgctgcgcgcgggcgtacatacggtcattctcccgaaggagaatgaaaaggacctcgacgagatcgacccgctggtgcgcgaaaagctgcgttttgtgccggtcgagacggtggatgccgtctttgccgaggcgctggtgctgcccgaaaaatgcaccgctgccgcgcacgagaactatcttcctcccgtgcaggagagcgcgcatggcgcgctgcgtgcgggcgaaatgagctgaaaggaaacgaaaaccatggtgatcaacttcaacaaggtcgaatttatcctctcggcggcgtcggaaaagcagttcgtgcgcgacgggatgccgcagctcgcgtttgcggggcggtcgaacgtcggcaaatcgtccgtcatcaaccggctcgtcaaccgcaagaactttgcccgcgtgggtgcgtccccgggcaagacctcgcagatcaactactttaagatcgacggcaagctctacctcgtcgacctgccgggctacggctacgccaaggtctccaagaccgagcgcgaccgctggggcaagctgatggaaaactatttccagtctgcggggctcattcacctcggtgtgcagatcgtcgacgcgcggcacaagccgacggcggacgacgtgacgatgcacgactacttcgtgcagacgggctgtcccgtcgtgatcgtggcgaacaagctcgacaagctcaaagcgcgcgagatcgagccgaatcttgcccaaattcgcgagacgctgagtttgcgcgacgatgagctcgttattccgttctctgccgaaaagggcacgggcaaggagcagctgattgcggcaatcctcgaccatttgaacgactgaaaaggaataatgcttcacagaaaagcctctgtatgggttgaccatacagaggctttttatcgtatttcccggggaatcagcggcgcagcgtcaaaagcgcggtgcagtgggagaaggattcaaacgtcagcgcagggaagtgagggcggagctcgtcatagacgaagtaaatttcatcctcgtcccactcactgcctgccgcagtccgacacgcttcgagctcttcgcgcgtgcggaaggcgacgtcgccgatgaaaagacagccgtcctgattcaaaagcggcagaagcgcgcgaagaaagtcgattttctgcgcgtccgtcaggtggtggagcgagtaggtcgcgacgatggcgtcgtactgccgtacgcaaagctcgggcacaaggcctttggaaaaatcgccctgatagagccgcgcgtccggcatttttgcctgcgccagttcgatcatgcgcgcggaaaagtcctgtccatagatttggcagccctgctcgtagagccgcgaggtcagtatgcccgtgccgaagccgatatccagcacgttatgcccgctctgcgcgagcacgcgctgatagagcgcgttcatcatggcacggtaacccgcaaaggggtagcggtcgttctcgtcggagaggccgacgctcttgtcatagccgtcggcccagaggtcgaagccggtattgttcagcatgtcagtcctccttttcgttcagcgggggaagtcccagctcatagaacgccacggcgctcgctgcggcgacattgagcgagtcgacgccgtggtacatcgggatcctgaccgtgtagtcgcagctcgcgatggtcgaggacgcgagcccgtcaccctccgtgcccatgacgatggcaagcttttcttcggcggcaaggcgcggatcgtcgagccgtacggagtcgttgcgcagtgccatcgcgactgtgcggaagccgagatcgcgcaaaagctgcgtccagtcgccgctttcgggcaggtaggtccacgggatgaggaacacatttcccatgctgacgcgcgaggcgcggcgataaagcggatcgctgcccgcagtcgtgagcagcaccgcgtccatgccgagcgcggcggcggagcggaagatcgcgccgatgttcgtcggattcatcacgttttcgagcacgacgacgcgccgcgcatcgcggcagacgtcctcgacgctttggagcttcggccgccgcatggcgcagagcatgccgcgcgtcaggtgaaagcctgtgagctgcgtcagcacggattcatcagcggtgtaaaccggaatatcttgacagcagcgggcgagaatttcgcgccccttgccctgcgtatgctgccgctccatcaggaacgacaccggctcacagcccgcatcaagcgcacggccgatgacgagcggactttccgcgacaaagagcgcgttgtcggggtccgcgcgattgagcagttggttttcggtcaggcgcgcgtagacgtcgagcgcgggattggaaaaatcgtggatttcgatgatgtttgccataggttttcctttttaagattccaagatgttcagcagtgcggcgacgtccggcagaacgaacgtcggctgcgggtcagcggtggggaggccttcttccttcgtctcgcccgagagaacgagcagcgtgtcgatgcccgcgtttgcgccgctggcgatatccgtgtagatacggtcgcccacgagcagtgtttcctgcgcggaaacgcccgcctcgagcatcgcgagctgcggcatcagtggttcgggcttgccgatgacgatggggcggcgggatgtcgcgcgccagagcatttcgcatacgctcccgcagtcgggcacgaagccgtaggctgtggggcagacccagtcgggattggtcgcaaggtagggaacgccctgtccgagcaggatgcaggcgtcctccagcttttgaaatgtcagctcggtgtcgaagcccatcaggagcgcgttcgcgtcctcacgccgttctgcgacggtaaagcccgccgcgcggagctgtgacttcatcgattccgtaccgcagacataatagcgcttgtcttgaccgtcgtgctcgcggagatagtgaatcagcgcatcgaccgaggtgagaaaatcgcccgactccgccgcgacgccgaggcgtgtgagcttctgcacataggcctccacgctgcgcgaggagttgtttgtcagaaagcggtactgcccgccgcgtgcgcggatggcagagagcagctcgcggacgccttcaaagagccggtcgcccaaatagagcgtaccgtcgaggtcgaaaagaaagagctttttgcactgaagtagattatggtcaaccattggtcacgctttctttttgccgtcgatcgcgatgaagaagaatgagctcaccgccagaagataggggtagaagaggttcggaatgatgtcgaacgctgagatggcgtagcccagctcatgcgccgccgagatcgcgacgagcatctgcgcgccgtaggggatgatgccctggaagatgcaggagaacgtgtcgaggatcgacgcggccttgcgcggtgtgatgccgtattcctcgctcatctccttggcgatggggttcgccataacgatggcgacggtattgttcgcggtggcgatatccatcgcgccgacgagaaggcccatgccgatctggccgccgcgcttgccgcgaaacgcctttctgatccagccgagcagcgcttcaaagccgccgtactcacggatcagcgcacagatggcggaaactaagatcgcgaccatcgaggtttcaaacatcccggccgcgccgctgcccatgttttcgagcagggccttgacagcgaggatgccggtctgtcccgtcgcgccggtcgcgagcgcgatgaccgcgccggagacgatgccgatgagcagcacaataaagacattgatgccgatgatgccgccgatgagcacgagcacataggggatgatctgaatgaggttgtagggcggaatctccgcaggtgtcacgtcggcgtggagcgtcaacacgaggatgagcgcgagcgacgcgagcgcggcggggaaggcgatgtggaaattttcgcggaatttgtccttcatcgcgcagccctgcccgttgcaggcggcgatggtcgtgtcggaaatgaagctcaggttgtcaccgaacattgccccgcccatgacggacgcgacacacagcggcagggaatagccgctcgccgcggcgatgggaatggcgatggggacaatgagcgtgatggtgccgacgctcgtgcccatcgcggtggagacaaaacagcttacgacgaacagcaccgccacggcgaatttcgatgggatgatcgagagcataaagtacgcaacgctctccgcgctcgagcggcccacgacgccgacaaacataccggcggctaagaagatgagcagcatcgtgatgatgttcttatcgcccacgccgcggcccatcagcgtgagcttttcgtcgaacgacagcgcacggttctggcagcaggccacgagcagcgcgatgaggaagatgacgacgatggggatggaataaaatcccatcggaattttgagcacatactcaaagacaaggccgaggcccagatacaggacaaggaacactaagatcggcagcagcgccgcgggattggctttttttgacatgggatgacactctctttctccaaacataaaaaaagctcctgcgcggagctttttgtgcgatatgaattattataaggagcgaatagatgcttgtcaagtaagacttaactaaatttgagcgcaaaagggcttgacagaaggactctaatctgttagtgtacaaatatactctaacggattagagagggaacaagatggaaacgccgaaaatttttgagagcgaataccgcttttgccaaattctgtgggcacacgagccggtcaagagccgtgaattggtcgcgctctgcgccgagcacctgggctggaaaccgacgacgacctacacggtcatcaagcggctctctgagcgcggggtgctgaaaaacgagaatactgtcgtcacgtcgctcatctcacaggacgaggcgcagaccgccgagatcgacgagctgctcgacaagcgcttcgacggctcgctgcctgcgctcgtcgccgcgtttacaaagtcgagtcacgtgagcgacaaagagcttgacgaggtgcagaaaatgatcgacctttaccgaaaggagaatcatcatggatgacgtctttttgaagctcgtgaacctcagcatcagcgcaagctggctcattctggcggtgctcgtgctgcgggttgtcctcaaaaaagcgccgaagtgggtcatgccgcttctctggggcgtggtcgcactgcggcttgtctgcctgttttcgattgagagcgcgctctcgctcatcccgagcgccgagacaatcccaagcgagatcgtgaccgaaacgcgcgagccggtgctctacgagcaggcgacgctcgacatcgtcacgaatccgacgctgccttcagcggcggaggtccccgtcggcgtgagccgccagcaggcgcaggtggacttcaacatctacagcgtcctctggctcgccggtatggcggcgctgctcgtccacgcgctcgtgagcgcgggaaaactgaaaagaaagctcgcaacggccattttactgcgggacaacatctacgagagcgaattcgtcgattctccgtttgtcttcggtgtaataaagccaaaaatctatcttcccatgcacatggacgaggggacggcggcgtatgtcatcgcgcacgagcatgcgcaccttgcccgccgcgaccactggtggaaggtgctgggctacctcgtgctcgcgctgcactggttcaacccgctggtgtgggtcgcctacatcctcttctgccgcgacattgagctcgcgtgcgatgaaagagtcgtgaaggggctggacggcgcggcacgcgcagactattcgcaggcgctattgtcctgcgccgcgccgggaagagctgtcgcggcctgcccgctggcgttcggcgagggaaacatcaaaacgcgtgtgaagagtgcgctgcactacaaaaagcccgcgttttgggtcgccgcggcggcggtgctcgcggtcgtgatcatggccgtgtgctttttgacgaatccgaggtcggacatcgatgcagagacgctgctcggcacctcgagcgggaaaatcacgcgtgtcagcgtcaagatgggggaggcggacagcggtgaagagtaccgcatgtcgacaccggagatcaaggatctcctttcactgctggacgcgatagaatatgagcgcctcggctctgcgtcggtgatgcagggctgctatgcaagggtgtacctcggagacagaaaagaggagtactgcgagctgatgctgtcggaggacggcatactggcaaaccccatcaagggcggcaaaaaagcgcagctgtatgagctgcgttccggcggcacggtgctgaaaaattatgtcaagtggtgcataaatcggaaggaccctacggtgccggaggacctttttgatcagatcgaccagctgctctgcgacatgccactcggggagtatgtgttgggagaggtcgtgttcgaagactcagcttgggaagcaagctatgccgagacctttgacgagggaccggcggacctgcgggtcggcggtgcatgttctctggccggaccgcacggggcgagcagcgggtattattaccgcttttccacatgggaagagatcacgctgaaaaagagcaacttcgactggctgttccgcagcggaagcggcgaagattggaacggcacgagcgctgcgaagctgcgccgagaaaatgtgcgcgcctggcgcggcacgagaacggctgaggacgacaatgcgacggccccgcttgagagatatctccgctgggatgagctcacggcgatggatcagtggctcttattgcagcagaaggacggcagtctttacctcgtgatgggctatcgcagcggggcgtatccctaccgctggatcgtccgcctgaacggcggcgcgaccgagctgacccgcgctgacctgaacggcgacgggatcgaggaagtgatctcctataccggcacttccacgcaggagccgtaccggctgcgggtgagcgatcagagcggcgaagagctctggagcgcggagctggggctggcgcacgtgggctggagcagctatttcctctatcgcgacagcgtcaagacggcgctgctgtgctacgagccgacgatgtatcagggcgaggcgtcgtattcctataggctctttctgctcagcggaagcgagacgaccacgctggcggagaattcggtgagcttcagcataaatcccgattctaccgacccatggcccgccgaggcacagaaattcgcggacgaggtcaacaggcttttagatcagagcgagcttttattctccacgctgaacggcgagctgcactgttacggcgacggcgcagtcatccgctgcacagatccgtcggagagcgacggcagcaggacgctgatgtccgccgacctcgacaatgacggcagagcggagcggattgtatgcaagaacacgttcggcgtctatgagctgtgcatcatcgatgacaacggcgaggaaatgatgcgcgaccgcatgtcggagggtgacgtgtacctcctttgccgtgaaaacgggcgcgacatgctactgctgtatcacttgatcgagggcaaatatcagggcagaagcagctattacggctattactatggactttacacctatgacggcggcagctgtcacgttgtggaaaatgccaacgcgggcatttatctgaatccgaccgatggccagaacggcgagtggggcaaatcggaggaagcgttcgccgcgcgcgtcaatgcgctgatagcccagagcgaattccttgtcgcttggcagggtggcgagctcattttgacgagcgaggtgtatcgctggtactgcgtatcgccgagaaagctcacggcgacgctggacagcacgacggtcagtttcggcaaaaagagctgggactttgccgggcaatacccgtcgctcagcggctttgagggcagcgagacggtgggcaactaccttgtggtgacgggacgtctggggaagaaaaacgacctctatgtggtgttcaacgccatagacggcacgctgctcaagaccttccccggcaacaaccttatctggcaaggagatgacctttccaccgcggtctactcctactggtcggacatctacgcgctcaacgggacgaagctcgccgcactcgatcttacgagcggcgaggagatcagcggcctcacctttgcgccggacggcgtgtcaatcattgcgacggtctccggcaagagcggcgagcgtaaggtgaccatcacgcgcgagggcagcgcgcagcagatttcgctcaccgattggatagagggcgacggcgcggagcgcacgtacttcgcccctgtcgggatcgaggggaacgagacatttctggcgacggtcggcgtgagctaccggctggaacagcagtcggacggcacatcccgcatcgcggagatcacaggcgcgcaggggctcacgctgccgcgctatcgccgcggctgggtcagcgtggacgaaaaggccgatgtgctggacgccgcgatcgcggacgacggcaagagcgccgacgtgacggtgcagtattacgcgagccttgggtcgtcggggtatcagacgtacacggcggtggttaatattgtcgcaccttaggggtgcgagaggttccctgcgccgcgcagggagtgcgaataaagggggccattctctcacgtgagagaatggcccccttgaaccaccaagagaacgcaaggggctctgcccctcgaccccgcacattggcagtctgtatctcgaagagctgcggcgcttgccgaatcaggtgcggtgtacatggcttcgccatgaatctctgcgattcgtgacaggtcgcaaccgcgccttactatcgtgaggcgcgagtgacgtttgctcggcggcagactgcgtgcgaaatagcggcattgctgcgctcgccgcattgtggggactggcggtagacggaaattagtttgcactcctacaagatcagcagagcggcacccgcaaggggtgtgccgcatccgtaaggcggcagagccgccaacggctgcgcaacagcggataatagaagcacaccaagtcgtatagcaacactaaacgcggcaacgccgcgcgcaggcatttccattccggaggcaagagacttgcgcaagcctgagactgccaatctaagcctttctcttggggttccaaagggggcattctcttttgcgaaagagaatgccctctttgattgcgcgacacaggattattgacgaatacgccaaacgccgtcttcgttccggagaaggacgaaataatcctgcatgcgctcgaacggcgcgtagctgcggcggtgcttgtcgacgttgaaatcctgatattcgcgcgcggtctggatggggtactggaagcggctgctctggtggacataataaaattgtccgttaaggcgggacacattatcgctgaggggatgaagagagcaggcgatatagccgcgccggttcgtgccgctgttggggaaagagaggtcggcacagtagagctgccggaagcaattttcgtaccagttgctgaggctggcctgttctgtgccgggatcaatgtagggagcggtgtaggtcgtgccgtccggactgtcatagaacacccggccggagaattcttcggcaagccagctgccggtgtcgcagtttggctctacggcaaagctctctgtgccatagaaatgtgtgccttcgtcccagcggaaatgataggagagaaacagtctgccgaaggggcgctcgacggcgacgacagtcatgtggaaagcatcatttgtctgcgacttgccgttgtagttggtgtagccgccgccggtgcactccctgacgagcacacgctcggcgcggagacaggtgagtaggtcctcgtcggagaggtcgttgagctcggattcgggatagccgagggcgaggagcctttcatgggcttcgatcacctgtgcgtcagtgccggtctctttgggcgtccagtccatgcggtaggagccgaaaaacaggaagccacaggcaatgacgacagcgaggacggtgagcagcgaaccgacgagcttgtgatttgagaagcgctccttgacaggttcgatggcgcagccctgcgcggccatcgactttgcgagcttgttgaggcggacgaccaggtagaaataccagacgacgtaaacgccgagcagcaggggaagcgaggcaaacaatgccgccgcgacatagagcagaatgtaccagagcagcagcgcgcccgcggcgggagcagcgggcggcgttataccgacgtcgcgctgcatgtcgagcagaccttgccagaggcagaagagcagcgcgagccgcacggcggcggagccgaaagccagcgcagtggacaccgtgtctgccgcggcggtctcgcggcagacggcggcatcctgcccaagctcaacaaaaaggagcagcatgtgcaggtaggcgcagacatagcccgcgcgcaggaagccgttgacccgccgcagggcgcggaagccgacgagcaggcagaatgtgccgaccagcggcagcagcacatcgaggttccagaaattcagcgtcacgccggtgacggcgaggccgccggcgatcaagcccatcgcgcggcagaagggcgaatcgctcacatcgggcgtctctacttcgggcgcggagagcgagtcggccatctcctgcgcgggcgtgagggcctcggccggttcctcctgcgcggaagcatcggcgggcggttcaggcgggggagtttgcggcaaatcgggaaaaacttggtcggtcatgcgaattcctccttgacgttatgttaacagaagattacgagatcgagacaacgagccgccagacaggctcggccagataatagccgaggacagcggaagccagattggcggtgatcgcataggccgcggcgcggcccttgctgtggccggtgagaaagccgcagccggcgtagagatacagctcgacaagcaaaatgatgagttccgccggaagcagaaagaaaaagagataccaagcgctcacgccgctgtgtgcggtgacagatacagatgcaacggctaaaaagccctgtgtcagaacgttgacaagtaaaaacgcttcccagtttttcttccacgaatagcggaacagaagcagcagcgcgccctcgatgagaaacgtcggcacgagcgttgcgacaaattgcagcaagtagccggggatggttgagggaacggaaacggtgactgccgacgtatcgtccgaccagttgaccgtgacggacgattgcagaacgcggcgattgagtatatcggagacccagaccttgccggattcggtgacgaggatgatgcggtaggtgctcggcacaccgacgtagccgaaccagtgcagtgcattgccagaggcgtctgtgttctctgagtatagctcaccgtagattggtgcgccggtcgtgccctgcgccacgcaggcgtgccagcctgcgggcacgttgtcgcgcagaagtgctaagaggtcggggtcgagcgtatcctctttgccgtcgtagttccagtcgatgccgtcgatactgtttccatcttccgcgccccaatcacccttggcgagcaggtcgagatagtagggctcctgcggcgcgtttttgacgcgcacgatgagttggggcttcggcccgttgtcggcaaaggcaaaggtcgtgagcgcaagagacgcgaggagcgcgcaaacgagcacgcgaagagactttcgtttcatccaaatttcctccttttaatgttcggtgttccatcttccaatcgtatagacgcaaaagataacaaaaaagtttcatgcttttacaagttttatcataaaatgccgcgctgcgggaaaaagttctggcggggcgttgtacttttttcatattctgctacaatgggggagaaaaagaagcacattgggggaacgaacatgaaatggtatgcgatcggcaagacgctgacgccgctggaccgcgcgccggagagcggtgcggcggtggtgctgctgaattcggacgagttggcgcacgaaacggcgctgccggggctcgatgcggtgctgcaccatacgccgagcgcgcgggacgcgcacgtctgcaaggcggaggtgcgctccaactgtctgagcggaacgctcgcactgccgcgcggccgcagggacggcacgcgcctttgctgcggctatctcgtgacgaaggaccgcgtggtgctggtggacgacggagagatggtcgagccttatttgaaacgcatcgttaaggaaaaacgtctgacagaaaacagcgtcgggcgatttctctacgacttcttcgagctgctgatcgccagggacctgcaccgcctcgaggagatcgaagaccgcgcgacggcgctggaggaacgcgtgctcgcgggcgagctggaggaattcagtgccccgatgagcgagctgcgcaaggagacgatggcctggtaccgctactactcccagctcgacgacgtggcgtgcgagctgcgggaaaatgagaacggctactttttggacgaggagtgcagactgttccgattatttgaagagcgcgtcatccgcctgcgcgaggaatcgcagttgctacgtgaatactgcacgcagatccagtcgctgttccagtcggaaatcgacatccggcagaatcgcatcatgcagatattgaccatcgtgacgacgatcttcctgccgctgacactgcttgtcggctggtacggcatgaacttttccggcatgccggagctgcactggaagtacggctatcccgcgatcatccttgtgagcgtcgccgtggtggtgctgagcctgtgggtgtgcaaaaagaaaaaattctggtaagcaaaaaggaacggcgtgagccgttcctttttcttttgataggagtcactttttatcgaagtagtaatcgcggaagttgtggtactgcgcggcgtagtagcgcagcaggcgatagagtcgagagagcggcagatcacccttgcagaagagcgtgtgcgtgcccttgaactgcttgagctcgtcggagagctcctgatccttgacatagcggcgcagaatgccggtcggcacgttctgccagagggcgacggtgtggttgtagacgcagtcctcgcgcttgccgtagacgacatcgtcagtcaggagcttcatcatgttcagccccgcggcacggcagaaatagctgctgcggccaaggcgcgggttgatctcgaagagcacgtagcggcccgtgcgggagtcgtacttcatgtcgatgttcgaaaaaccgacgtagccgagcttttcgagaaactcctgcattttgtcatacaacgcctgatcgccgcgcgagatgatggcggcatagttgccgacggacttggggtcgtagtattcgagcaccggctggccgaggcacatcgcgcgcacatggccgtcaatgtccgaatagctgttgagcacgcgcaacgcgtcgtcgccgccggggataaactcctgcaaaatgagcttgccgcggtagtccgactggttcatgctgtggaccatcgtgaggtactgctcgcgcgtgtcgaagaagaagacctttttctgcccctcaaaatggcagcggagatagtcgagtgcattggaattctcgggcttgacgacgatgggaaagtcgaacggaagacagtcggcgacgctctcgcgatcctcgggagaggcgacgacggtcttgggatagtccatgccgtactgctcgcagagggcgtagaacttgtctttcgtgtcgaacgtttcaagcagctcatccgagatgaagcggttggcgatgagcccctcgaaatggtcgtagtggcggcagagaagacccgtgtaatagtctgagcaggggatgacgagcagcttttcatagtcctgtgcgcactgcttcagcacgccgagcagcgcgtcggggaagacctcctcgcgttcaaaatccgggatgatgcggcagagaaacaggtgcgagctgcgcgtgggcacgagctgctgcgtgcacagcagcagcggtgtgacgtgataggcctcctggaagagacgcgccgtgccgtaggcgttttcgtcgctgccgaggatgatgggcaaaaagtccttttttgcctttttggcgctgctcgccggcgcggcgggatggaccttgtcgtattcggcgaggtatttgagtgtgagctcgacgtcgctcgggtaggggacgaagacgctgccgcgcttcatcgttgtctcttctcccttgccggtcagcagaatgacgcgcgcgtccttgccgtccagaattgcgcggcggatgcactcggcgcggtcctcgagcacaaggtgcgggcaggcaacgtgcttttcaatgtcggcggcgatctgcgcgaacggctcttcgccggagtcctcttcggtgatgaagacgaagtcgcagttctgcccgctcagctcgccgaggtcttttctgcgctggagcgcgtgggagccggggcagccgaagacggagatcatctggcggccggggtattcgatcttcgtcgagcggtagagcgcgtcaaagctcatgcggttgtgcgcgtagtcgacgatgacggtgacgttcttgtcgcggctctcgtagatctgcatgcggcccgcggcgcgcgccttgcgaaggcccgagcgcacatactcctccggcacgtcgagcatcatgcagatggccatggcggcaagagcattggagatgttgaaaaggccgggcatcgtgatggaaaattcaccgttgtacttgagcgaggaaaccgtgaagtagagcccgtcgctgcgtttttccacatgccggcaggagacggtgtcgctctcatgcgagccgaacgtgatgaggttgcagcgatccttggcgtattcgatgacgcggtccgagtacttggcgtcggtattgacgcagccgaagcggcaggagtcgaaaattttgagcttggagttgaagtaatcctcgaagtccgggtgctcgatggggctgatgtggtcgctgccgatgttcaaaaatgcagcgacgtcgtacgtgataccgcgcacgcggccgtatttgagcgcctgggacgaggcctccatcacaagatgcgaaatgccgctttcataggcgttttcaaagtgctggtagagctcaagcacctcgggcgtggtgatgtgggactcctcggtgctcttgccgtcgtagttgtcgatagaggagagaatggcgcactcgggcatcgactgcgcgcgcagccagtcatttaagatgtagcgcacgtagtaggctgtggtgctcttgccctttgtgcccgtgatgccgacgcttgtgagcttgtccgtcacatggttataaaagagctgaccgagcacgacgagggaatagcgaatatcgttgacaagaagacagggcgcgtccacattgtgctttttctcggcgacgtaggcgatcgcgccgcgcgagagtgcatcgttaaggtattcttccttaaagtgcgcgcccttgcagatgaaaagcgcgtcctcgctcagtgcgcgcgtatcgtaggtgagacagtgaatttcacgcgcggcgagctcgtcgctcacggtgctttcgaccagaatgcctgcctcgtgcagtgcgtcgacatattctctcagtgtgtgaacggtattcataaatagctcctttgggtcttgctttttcggcaggacgggataaaatataggcgatatcgcgtcagatcgacacgatattggcaagcaaactcatttccgaagggggaaccaacatgacttatcagcaagtgctggaaaacgcaaggacctgcatcggcccttactgcaaggcgtgcaatgactgcaacggcaaggtctgccgcaacacgatgcccggccccggcgccaagggcgagggcacgggctttatccgcaacgcagaaaagtggcgtgagatctgcgtcaacatggacaccatctgcgaaaattcacaggtggacacctcattcacgctctttgaccggacgtttgagattccggcgttcgccgcgccggtgggcgcgatgcgtcttcactacggggacaaatacgacgatcttacatacaatgatatccttgtgcgcgcgtgcgcaaacgcgggcatcctcgctttcactggcgacggtaccgacccgaaggtcgtcgagggtgcggctgcggcgctcaagggcaatggcggttgcggcgtgccgaccatcaagccgtgggatatggatacaattcgcgaaaagttcgcgcttgtgcaggaagccgagcccttcgccatcgcgatggacatcgacgcggcgggcctgccgtttttgcagggcttgacgccgccggcgggcagcaaaagcgtggaggagttaaagcagatcgtttcctgggcgcagcgtccgttcattttgaagggcattatgaccgcccgcggcgcggaaaaggcgctggaagcgggcgcgagcggcatcgtcgtttcaaaccacggcggccgtgtgcttgaccattgccccgcgacggcggaggtgctgccggagatcgtcgatgccgtcggcggtaagctgacgatttttgtcgatggcgcgatccgtagcggtatggacatgttcaaggcgctcgcgctcggtgcggacgcggtgctcatcggccgtccgttcgtcaccaccgtctatggcggcggggaggagggcgtgcagctctacgtccagaagctcaaagccgagcttgccgacacgatgcgcatgtgcggcgcacactcgctcgcggagatcaagcgctccatgctgttcggcttctgacgagtatatattatatagtatagcactgcaagaaaaggctgacaagggaaaatcagaagaaggggacggcgaaattgagctgttcctttcttgctttcttttgctgtatataatattattgaaaatgggaacaaaattgccgcgctgaacgtctgagaaaatatagagccccttctaaaccgtttgatttggaggaaagtgcaatgaaaaaggcaacgagccgtatctggctcatcacactgacagcgctggcgctactttctctcggcggctgcgcgcaggaaaaagaggaaaataccgaagaaaacgacccgcaggcgcgggaggcgatcctgcaatgctgcgagttgatctttggcagcacgggagaaacaggcacttatcatatccgtgtgacggacgaatcagacggcgggcgcgtggatgaatacgactgcccacgcggtgcagacgagcagggctatggcaattcgcctgtatatgcgctgagtgaaccgtcgatgtacggcgacgagccgtggtatgcggcggcggagcaggactgggacgattgccgcaacggggtcgttgcggagatttcttatgggaaagatgcgatcgcgttcattccgccttggggagcgataaaaacagatgcggagtacgagcatccgggcggcaacgtgctgcggctgacgcaaaacggcgagacgacctattataaaagcaatacggcgcacgcggcgcagctcctcttcggatatgcacaggacgcggtgatggaaaagctgtacgacctgcacgttcccggcacagagacggactacgagaatatcgcaaacgagttctgtgcgcagttcgccgctggcctaaacgccgcgccgcgctggttcagcgggaaaccggatgacgcggcggcagcggtgaaggagcgcgtgttcgacgcgtattacggaacggactacccgaatttctgcttcggctttggcgtgatgatgcgctttgatgacccggagtcctcacagcgctatcaatgggaggccggcagcggcatgatcgagccgacgggcgaaggcgagtacggcgattattatggctggggtatggccgcggacgcgtgccgggatgaagcgggaaactggtacattgacggcacatggacgggcggcggcgcggtctggctgccgcagattggccgtagtctggattccggtcagcaggaggcgacggcggcgcagctcatagactgctggtttttgtcggcgggcgagtcgcacgagtggcggctccccaatatgatctacgcccgcccaggcgcagaactgcgcaaagcgtttgccgagctcacacccgaacaggcggcggaactggagacaggtctgcgcgccgtatgggacgatccgctgcatgcagagagttttccgggcggctttgacgcaaagtacaatgcagactgaaaagcattgatgtaaaaacaggtaccagtgctgtggaaaagcaacaggagagggcgggggagcggcctctcctgttgttcgtttcttgctgcctcaaaaggaatttgaagaaaaaacgaaaagtttggaaaaaactgttgacaaacgataaggtacgtgctaagataacacctgttccgcgaatggagcgtgcaccttgtaaattaaacaacgaaactttgacaagcaccagatgaaaaactgtgcgaaatgcacagagcttgcggaggaccggttaagtcaattacggtctgaagtaaggataaaaagttttaagctatgacaaatagctcgataaagattagctcagacttaggtctgtgttgataccattttattgagagtttgatcctggctcaggacgaacgctggcggcgtgcttaacacatgcaagtcgaacgagaatctactgaaagagttttcggacaatggaagtagaggaaagtggcggacgggtgagtaacgcgtgaggaacctgccttgaagagggggacaacagttggaaacgactgctaataccgcatgatgcataggggtcgcatgat

SEQ ID NO: 22 - DNA, 209030 bp, Colonithrix sana
  source 1..209030: mol_type = genomic DNA
  misc_feature 7627: note = n is a, c, g, or t
  misc_feature 8003: note = n is a, c, g, or t
  misc_feature 8481: note = n is a, c, g, or t
  misc_feature 8957: note = n is a, c, g, or t
  misc_feature 9283: note = n is a, c, g, or t
atgcgttcccaacgctctataattttatggtcgttaattccgaattcctgcatcgctgcatagatactcagatgttcttttttcatggtttctacaaccattctcttgaactccggcgtatatcgtttgtttggtactccttttggcatagcaaaacaccccacttcttagatagtatatcatactgtctaacaaatggggtgcagttcatacttttaccactggggattataagttgcggacatacacatatacagcatacacctgtttgtgattgctgtttttggggatatgtcaaaattgataaggcaaaagtattcttaaattgggtacaaaaaactaagcccctacaaaaggagctatcataatcctttgttcccactatttgattatagttttatttaagaataccttgccgcatattttttactccttttctggattaaatcattgtatcacatcagttttaggaaagcaagtacctaaaagaaatttttcttccccttacccgccccgaaaacgccttgtagggcgtttctggggcgtttacagccctttcttaaattcctccaccaacagatcgctcaaagcctgtgatgggcgtattttgaccgttatatgcccctccggtacggtgtcccaccatttgcggatcgttttcggatcaagtccggtgtccctatgacaatcggccttgcgtccctctggatgctcctgccgccacgcatagacttgcgctttcttttcttctgccccttttcttctccatgtgccgccaggataatccacttcctgcaccgcccttgctcttttcaaatgctctttctgtgatctaccattcctcttgttgcgctcgatgcgaacatcggtcagagcttcaatatcggaaatcgtgaaattgtaatactccttgtcgtaggcttccagcgcactccgtatatcttcctcggtcaatgcgttctcatgcttcaccatctgcagatcatcaaaagcctctttcatatcctgccggagctgctgcttcgacacaccgcatttgtaagcatagatagcaaggcacatcaaaaagaaataccgatgcccgccctttatctctccgatctgccgcagccaccaatggtagagcgcatacggatcatcaccatgcacctttccggcaatatcccacttcttgcgtcctttctcgcctctcacaacaacacgctcataccactccggatatgcctccctcgcctcagctcgtgtcattttggatgggctgaaaggcttattgacatccaccctgttttctggctttgcgtaggcgttcagataatccagcgttacccgttctccggtacggaaagcgaccagctccgtcccatgcttgtcattgatgctgcccaccatgcggaagctctgattgatggattgatactggatcgccttgacctgcgaagtgctgccatactcccatagccggaaagtgaggtcatatttcagacttttaagctgaatttttatattcgggtataggtcaatcggctgctggaaaacatagtagatatgcagccctgtccccgacagaacaaggaaagtcggcatcggcaaccggcgcactcgctccggatcgccgccaaagcgcagaaagaggttgcgcagctcggcaagacctacgccatccagatcgaagatcagagcatacatccgctgggcgttctccagcctgttctcctttctgcgatatgcaagaccgctgcacaaagtaaggctgttcccctcgacaaactccatgtaatcctgttcccatgtgtcgttatacatcttcctgcgccggagcttcttatcctcgctctgttcgtcccgatacagatacacagcgttcggatgggaaaaatccgtgtgccgttctccggagttctcattgtccggaaacagctctttataaaactcatagcctccgacctccggatattgtgcgctcaaatactcgtagcagcctcgataattctcggtcatattaccacctcacaaaagaaaaagtaccaaaaagaaaatccgctgcggcggggatcgcctgcgggcgggaagggggaaaagggggagcaaaagagcggcggctacgccgccttaaagagaaagtcacctcccccttttccccctcgctgcggggcattgaaagtgccgccactatggaaaacccgatgggtttaccacagtggcttggaaaacctctaacgaggtttaccacacttccaacacccctccgctcaccccccttttcccctccgactttctccctttcagagagaaaaaatataggttgggagtacccttacagggggcttagattatcaatacagcaattccctattttcagttgttattatagcctgtccgaaagagattttcaagccctccggacaggcttcttttacagctccatgccgcccattcctcgctggtgctgctgttgctcctgctgctgtccaatctccggatcgggcagcagctccctcgccttttcaagcagaggacgcagacgctccggcaagtgttcttccaagaagtccagcatccgaccgatgccgtccgtcagacgctcggtgaagctgcgttcctcctgcagctcggattgcagataatagttttcatcgcgcagcctccggttttcctgttcaagcctctgctgccgctgcgcttcttccagccgcttcttcatggacggcacctgtgaccgcagacgggtgttttcctccgtcagctcctgtaccttgtgccgatccgtcacgctgcgcagtgccattttctttagctgctcgacctgatccaccgtcacgccctttactgcccctgtgagcgtcttttccggctgaatatcatgcaggggtgcatttaccctgtcagcctcctttaagagccgcacagtgcctttcagagcgtcccgctgccgttccagctcagcaacctcccgctctactgccgctgtctgctgctgcaccgtttccagcctcgcagccgcttccttgaactgcggcaagtccatgtgcggtctgttcgtgccgagagagataatttcaaaatcgtgccgctgggcgatctccgtcagagcttctttctcccgttccatccacgccgcccattcggtctgctttctgccgacaccgacaaacccctgctgcttcaatgcctgtttcatagatacccttgtagaaagtcctcttgactgctccgttgccacagggataaaatcgacatggagatggggcgttgcctcgtccatgtgcagcaccatattgaacacccgcagatgggggttgcgttctgcaaaagactccgcaaaatctttcagagctgccgccgcccgttctccgtccggcgtaccgcacccacagtcgctcatgttgccgatctggaagatcgcttcatggaacagcttttcctgtttactctgccggatatgctcatagtagtccggtatcttatctctcgttttggttttctttgcgttgtaggctgcgagagcttcatcaaagaccatatgatagacctgcttcagatcctcgttgcagaaaacaatgttctgctccgtccggctccggtctacattcgccgctgagaagctgcggttgttgtgccggatgctccctgcacctgtcatacccgaaatcgtaactcccataaaatcgccccctttccgcttattcttccgtcctctattttatcataaatttccgctaaaaacaacctctttgttactttctggtgagaaagtaacgcaaaagcactttcacaccgccaccccatcggtgcagcggtgtgaaagtgctttgcgcccctaaaggggaggggttgccggagctgcttcactgccggctcgtgcctgctgctctgccagctccggaggggcgctgcccctgccgtctgcggacggctccccgaccttcatcccaccgataaactgaaatttaatactcaatgacaattttcttgcacttctcgcagagccaagcctccgcagacgctccaccaaaaggtccaccgattgacttttcattgagtttgattgacttgcccccaccaatgttgagggccgcaataactcgttctttttcgctccaatagacaccatctctgcattgaatacaaccaagttgcatttcttcaccacaatacggacatttcattttaatcacccctacaaattcccgatttgtcgttctgtttagtccccaaagaacctactaaaccagctacgcttttgaaccggttctgtctcacgctccggctgatcggctccggacttgccggaaagaagctgctgatgcattgtcccagcatggagagcctgggccgctgccgcagtctgctgtgccgtcaccaacgccgagctgacctccgccaaccttgcgttcagttcctcgatctgcttgtcctttacagcaagttgctcgcttttccggtctaattctccctgcagcatagcgatcaaagtggtttcgcaagtttcgcaacttgctttcgcctgttgcgaaacttgctttcgttcaacacctaaataatgctgatatatggcggttttttgactttcgctgattgcgaaacttcctttcgcatctttcgcaacatggtttcgcctacaccatgcacgaactgcctgttccgacacgccacattctattgcaatttccgttattacacccgccaaatatcatcaccactctttcatccggagttaatctcaaaacaaatcgctatgagatcccgtccttatcaatttcaaaatcaaagtctgccgaacaactttatagaccaacagccagtccggctcgatgtgacattctctcatgtccttataatttctggaattagtgagagcatgatctcgatacgcctccggcaacggctgctcgttacacaacagcgtgatcacttcctccaacttcttcggatcgcagcctctcttgatcgcaagcttgtaatctcgtttgaactgccccgaaaactccggcttaagcattcagcgcctccatcagatctgcaacgctatcaaacggaccatacatatcctctcccttttctgccgcctccatcgccgcataggtaacagcattcggctcgtcaaccttgacttcaaagggaagtccatgacacctaagtgcctgtcgataaaaaatacccgttgccgtactcaaatccattccgagggacttaaagagagctgccgcctgtgctttcagctccggctccattcttatcgtcatatttcctttagccataatagcactcctttcctcgtcatttttagcttgcactaatattatattcaatattcgtgacatttgcaagtgcattgcaaatgtttttttgcaacttttctatgaacagtgctttctatatgctaacaccgcagcgtgtacatttagggggtgaaaaagccttatttcgcgcggttttcaagcctcgttttcggtggggtaatataaaaacccttatctttacattaccttctgaaacatatggcgcaccttgtccaggcggctgtttggacggcggggctggatgaccggctgaccgacagcggcctgatatcctttcagctctgtaaggcatacgctccgcccgttggtgtaaaaggccagatcagtacggtatgcctgtatacagcgggcgggaatctcgccagtaaagacaacttcatccttttttacctgggccgtttcgatggtggcacagtatttcggtgcatcatgataagccctggaaaggtattcctggggcgcatagaggatgaaggagagataaggttccagcagctgcgtccccgattccttcaatgcctgttccaatacaatcggggccaatgagcggaagtccgccggcgtgctgaccggactgtaataaagcccgtattcaaagcaaatcttacagtccgttacgttccagccgaacaagccctgctccagcccgtaacggataccatccctgacagcgttttgaaaactctggttcaagtatcccagcgaaacccggctctcgtattgtacaccggagccaagcgagagtggtgtaacagacagtcctatggatgcccaaaacgggttgggcggcacctcgatatggatggtgtggctggctgctttgagcggccgctccatataaatgacggagggttcctttaccactgtttcaagcttgtatttttccgacagcaaagcggaaacaacctccaactgcacccggcccaaaaaagaaagaatgatctcatgggtgatggaatccacttcgcaacgcaaaagcgggtcagtatccgcaagttgcgtaagagcgtccagcagccgttctctttgcgctgccgttttcggcgcaatcgtcgtccgcagcatggggagggggtcctcgcgccaccttttacgagggagccgggtttggtcccctaatacatcgtttaacctcacgctgtcgctgggaaggataacaatttcaccctgataagcggtgtctgtccgaacaatttcccctttggatggaatacgcatctctgtgattttcagcttttctctcccggccagggccaccgtatcccgcaggcgcagcgttccgctgtataaccgtagatagacacgccgctggccgcaatcggtgtactcaaccttgaaaacgctgccgcatagggcggcgcccccctgttccccaatcggttggaacagccctgtcaccgcatccatcaacggttgaatgccaaggccatttttggcgctgccatgatagactgggaacagggaggcgtcttgaacccgctgctgttcctcccgcgcaagtttttcccggctgattggttctcctgcgatatacttttccaataattcatcgttattttcgatgaccgcatcccatgcttctatgtcggtattttcctccaggactatttccggggacagcgacaccgtctgcttgatgataatatcggcggagagcttatcccgaacagactgaaccacgctctgcaaatcaacgccagcctggtcgatcttgttgataaagataacggtgggaatgttcattttccgcagggcatggaacagaatacgggtctgggcctgcacgccatctttagcggagatcaccaagatggccccatctaaaacagccaaagagcggtacacctccgccaaaaaatccatgtggccgggcgtatccacaatgttaactttacatctgtgccactggaaggaagtgactgccgcttgaatggtaatcccacgctgccgctccaaaaacatggtgtccgtcctcgttgtccctttttcgacgctccccggttctgaaatggctccgctggcatatagcaggctctccgtcaaggtcgtctttccagcgtctacatgggcaagaattccaatattgattattttcatgtgattgtcctccctttacagccccaaagggcataaaaatccccagcagtaaaatactgaagtgaccccaaaaagttagacaatattctgaagtaaaaattgttcaagcagccgaaagggcttgctgtctgtgaagagcaggcggcaagccctttagctttgccttgatgcgccgattgttgtaatagtccagatattcaatgagttccagtttgaagtgttccatggangggcttgctgtctgtgaagagcaggcggcaagccctttagctttgccttgatgcgccgattgttgtaatagtccagatattcaatgagttccagtttgaagtgttccatggattgaaattcctgcaaatacagcaactcactcttaagtaagccaaagaaattttctatcacagcattgtccagacagtttcccttgcggctcatgctctggcgaacacctttctcccggagcatccgctgatactgtttgtgctggtactgccagccctggtcagaatggagaatcaggtttgttccggccgggatctttgcaaacgcctcgtccagcatggtggttaccatgctgagtacaggacgatccgatatggtgtaacntctcccggagcatccgctgatactgtttgtgctggtactgccagccctggtcagaatggagaatcaggtttgttccggccgggatctttgcaaacgcctcgtccagcatggtggttaccatgctgagtacaggacgatccgatatggtgtaactgaccagatcgctgctgtgcagatcgagaatcggggacagatagagcttttctccaaacaggctaaactccgtcacatccgtgacccatttctggttcggcttttcggcgcggaagtcccgattcaacagatttggcgcaattttgcccacttctcccttataagagcgatacgtcttcatcctgacacggcaaactaagcccaactctttcataagccgctggacagtcttgtggttcacagagaatttacgcttgcgaagttctgccgtgatccggcgatagccgtatcgtcctctgttttcgtggtagatggccgtgatctnttctggttcggcttttcggcgcggaagtcccgattcaacagatttggcgcaattttgcccacttctcccttataagagcgatacgtcttcatcctgacacggcaaactaagcccaactctttcataagccgctggacagtcttgtggttcacagagaatttacgcttgcgaagttctgccgtgatccggcgatagccgtatcgtcctctgttttcgtggtagatggccgtgatctccgctttcacagctttatacttatctgcactgttcatccgcttcagatgatagtagaaagtggcacggggcagttgagcgattgagagaagaatatccagagaatgtctttgcctcagcttttgaactacctgcgttttctgcgctggcgtcgctcgtcttccaaaaccaaggcttgcaagttttttaggtaatcgttctccgcacgcaaccgctggacttctgccagcagatcttcttcnaagaatatccagagaatgtctttgcctcagcttttgaactacctgcgttttctgcgctggcgtcgctcgtcttccaaaaccaaggcttgcaagttttttaggtaatcgttctccgcacgcaaccgctggacttctgccagcagatcttcttctacctgcttcggcaactgctttggcggatgacccttactgctgcggccacgccgttcgatggctaacccttccggcccttcttccaaataaatgcgttcccaacgctctataattttatggtcgttaattccgaattcctgcatcgctgcatagatactcagatgttctttttnacctgcttcggcaactgctttggcggatgacccttactgctgcggccacgccgttcgatggctaacccttccggcccttcttccaaataaatgcgttcccaacgctctataattttatggtcgttaattccgaattcctgcatcgctgcatagatactcagatgttcttttttcatggtttctacaaccattctcttgaactccggcgtatatcgtttgtttggtactccttttggcatagcaaaacaccccacttcttagatagtatatcatactgtctaacaaatggggtgcagttcacagacggatgggcgttttctggtattttgcaacaaaaaggactcactccgccaaatcgttaaaaaaatgacggattgacacaattttaacacagaattgaccaaatcaataaaataattggttctttttgtcggaaatgccagaaataagattgaaccttgactttagtagttttgatagatataatgacctcaatctttatcagacataggacaaatgacaaagacttaacgatcgctggaggtaactgtgtatgaaacatgggagactaatcatagctgcgctggtaggggccatgctgatcacaagcctggccggctgtggcagtaaaggaacaaacgatggggagagcggcgaatatcaaaagatcaacctctctatggcagtcaacggaacggatacgcagatcgactcgctggtagcgcgtcactttgccgaccttgtgtctgagcgctcgggcgggaacatcgtgatcgacgtgttctcaaacgatacactggcgggtggcaacagcaccaagggtgttgagtacatcgccgtgggcgcctcggatctgggtgcttacgcaacgtgcgtgctcgcgaatctggagccgaagctctcggtcgcgacgctgccgtggtcgtttacgtcctatcagcaggcgcgcgaggtcatcgataccaccggcggcgagtattacgctgagatgctggcgaacaagggcatcacgtaccttggctcgttccacaacggcttccgtcagcttaccaacagtaagcatccggtcaccaaaccggaggatctgaaggatctcaagatccgtgttcccggttcggcggtgtatatgggtgtattcaacgcgctgggggccagcccggtcgccatgagctggagcgaggtgtttaccgcgatccagcagagaaccattgacggacaggagaatggctgctccgtgacaaagtccgccaagatggatgagatccagaagtacatgaccatctggaactatagctatgagaacgacctcttcgtcgccaacacaaaggtctgggagaacctggaggacaacacgaaagagcttctccagcagtgcgccacggagtcctgcgagtggggccgtgaccgtctggaggcagaggaggattccctgatccagggctttattgatgaaggaatgcaggtagatattctgaccgaggaacagcttcaggcattcaaggacgcggtggcagagcttacggcggagttaaaggctgattacggcgaggatgcctgcgccgctttcgggatcaactaaggagggacgagtatgtttgagaaaattgagaaattcgtttcctgcgtctgcgttttcgttatggcaatattggtttttgtcaatgtagtctcccgttttgcgtttaagcactctatggcagtctcggatgagatgtccacctatctgttcgttctgatgagctttatgggcacggccattgccgcccgccgcaaggcgcatctgggcctgactattgtcaccgatcacgtcagccctcgtgcacgcctgatcatcagcatggtcatgtatgccatttccgcgctgttctgcctcctgatcgtcattttcggcatccagatggtcatcagccagtatcagatgggtcaggagaccgccacgatgcagtggcctgagtggatttacggctcgtttgtccccgtcggcgcagcgtttgccatgatggcttttttgcagaccatggtgcagatgtataaggaattcaaggcagaggaggacaaataaatggtaggtatcgttttactgggtgtttttgtattgctgctggcgctcggcgcacctatcgcggtctgcctcggtatgtccagcgtgagcgcgatccttgtgcagggcgcaggcaagccgctcgaggccatcatgagcgttctgccccgtctgtgctcttcggcgagcagtaagtttgtcctgctggccatcccgtttttcatcctgtccggcaacgtgatggagaaggctggtatctccggccgcctcatcaatctggcggaaaagtgcctcggtcacatccgcggcggcatggcgatggtctgcgtggtcgtctcctgcttcttcgctgctatttccggttcgggtccggcaacggtcgcggctctgggcctcatcatgatcccggcgctcgtcaaggccggctatcccgcttcgttttcctgcgcgctgatggccgcgggcggcgcgatcggcgtcgtcatcccgccgtccatcaccttcgttgtgtacggctccatcgcggacgcctccatcacggatctgttcgtcgccggtgttgtacccggccttctgatgggtctcggcctgatcgtggccgccatgctcatgggccgcaggatggacctcaaggttctgcccaaggccagtggcaaggagcgcctggctgcgttcaaggacgccttctggggccttctgatgcccgtcatcatcctcggcggtatctacggcagcgtgttcaccccgacggaagccgccgcggtctccgtgttctacggtctgatcgtgggtgtgttcatctaccatgagatcgacttcaagaagatgaaggacatcctcgtcgattcctgctccaccaccgccaccgtcatgttcatcaccatgggcgcgacgctgttcggctacgtcctgacccgcgcaagacttgaccttgccatcaaggacttcatgctgaacatcaccggcggcagcaccgtcatcttcttcatcatcgtcaacatcgtgctgctgatcgcgggctgcttcctcgattccacctccgcgctctacatcttcacgccgctgtttgcgccggtcgctctgcagctgggcatcgatcccatccacctcggcaccgtaatgatcgtgaacctggccatcggcctgttcaccccgcctgtcggtgtcaacctgtatgtcgcgtgcggcattggcgatatcaagatcgaagagatcacaaagggcatcatcccatgcctgcttgcagaacttgtggtgctcctcctcatcacatatattcccgatctctctttgatgttcgtgggttgacctctctatgcaaaaaagcttcggaccgctatgtccggagcttttttgtacaaaacggcagaaaaacgggagaaaaaatcataaaaagaaaattttaaaaaggacttgactttgtcagacaaagcgctatactgtaattgtcatttgtccgacatagtataaagaaaccacagaaccaaacttattcatgaggtgatttttgtgaaggatatttccatcaaggaactgaaaaacaccgccacgcagatgcgcatgaaggtcattgacatgatctacaaggcgcagtccggtcatccgggcggctcgctttccgcggcggactttgtcactgcctgctacttcaagtacatgaacatcgacccgaaggatccccgctggccggaccgcgaccgcatggtgctctccaagggtcatgtgtgccccatccagtatgcctgccttgcaagcgttggctttttccctgagtctgagctcgacaccctgcgcaaggagggctcgatgcttcagggccacccctcgatgaaccgctgccccggcattgatatctccaccggctctctcggtcagggcctcgcctgcgcggtcggtatggccatggcgggcaagatggaccacaaggactacaaggtcttctgcgtcgtcggcgacggcgaagcgcaggagggcgagatttgggaggctgccaacacggcgcacaagtacggcctcgacaacctgatcgtctttgtcgactacaacaacctgcagctcgacggcacctgcgacgagatcatgcccaacggtgacttgggcgaaaagttcaaggccttcggctgggagacactcgagctcgacggccatagcatggaagagatcgtcgcgtgcatcgacaagtgctacgcctctaagaacggcaagcccaagtgcctgtatgcccacaccgtcaagggcaagggcgtttccttcatggaaaaccagtgcggctggcacggcgttgccccgaatgatgagcagtacgcgcaggccatggctgagctcaaggcccagctgatcgattaagcgaggagggaagagcaatgagtgagaaaaaaatgatcgccactcgcgagggcttcggcaaggagatcgtcgcgctcggcaaggagaatcccgacattctggtcgttgatattgatatcggcaagagctgcaagaccggcgaattccgcaaggaactgccggatcagtacatcaacgtcggcatcgccgagcagaacggtgcgggcgtcgctgcgggccttgccacctgcggcaagatcccctttgtcgttacctatgctgtgttcggctccctccgcatgtgcgaaatgatccgtcaggagatctgctaccccaacctgaacgtgaagatcgcctgctcccacggcggcgtgacccccgccaacgacggcgcatcccatcaggccattgaggatatgggcgttctgcgcaccatccccaacatgaccgtcatcatgcccgcggactacaactccgcccgcaagcttgtccgtcaggccgctgaggtctacggccccgtgtatctgcgattcacccgtgacgctattcctcagatttacgacgaggatgtggagttcaccatcggcaaggcccacaagatccaggacggcaaggacgtcgtcatcatcgccaacggcgataccgtccgtctcgcgatcgaggccgccaaggtactcgagggcaagggcatttccgcccgcgtgctcgacatgcacaccatcaagccgctcgacgtggaggctgtgaccgccgcgatcaacgaggtcggcaagattatcacggtcgaggaccacaacatcctcaacggtctcggctccgccgtgtgcgaggtcgccgccgagatgggcaagggcatcgtcaagagagtcggcattcaggaccagttcggccagtccgcgccctatgagcgcctgctcgccatgaacggcgtgacggtcgagaacatcaccgagatcgccgagacgctcgtcaagggctgagaaaaaccagttaaataacattcatcatagaattatctgatacaggaggttatttaccatgaaaatcggatttgtcggctgcggcgcgatcggcagctgctatgcaagctatctgtctcgcgagcatgaggtctgcgtgctggatacctatgctccggtcatcgagtccatcaagaaaaacggcattctcgtcgacgagtgcgtgcccggcacgggcaccggcgagaccgtcgtcttccatcccgccatggcgacaaccgaccccaaggagatcggcgttgtggatcttctgatcgtgttcgtccactatcagtatcttgaagcggctgtgcgcaacgcgctgccgatgatcgacaagcacaccatgatcctctgcctgcagaatggtctgggcaactacgatgagatcgccaaggtcgtgcccgaagagcagatcatcatcggcaacactgcgtttggctccacgcccgtggctcccggccatgtcaagcacactggcaccggcgtgacgaacatgggttccctgaaggcccccatggcaagggttgaagaaatggccaatgctctgcgcgaggctggccttgaggttcaggtccacgagaacgtgatgaacgccatctggcacaagctgctggcgaacgtcgccatcaacggcatgagcgccctgctcgagaccaagaacggctttgtcgacggcaaccagtacgcccacgaggcggcccgcatgctggtcgaagaggccatcgtcgtggcgaacgcctgcggctgcacgctcgaccatgacgccgagctggagcacgcctacgaggtctctcgcatgaccgacgagaccatcagctccatggtgcaggacgtcacgcatcaccgcgagaccgagatccgtatcatcaccggcgctgtctgccgcctcggccgtgagcacggcattcccacgccctgcaacgacttgatgctccagctcgtgctggccaagcagtccatctacctcggccggtaaaaaagccgtgcggcgctgtgccgcggcaaacgacgcaaagcggctcgcgcagcctgcgcccatatgaattcctgcaaaaaacggcagcttgccgttgattccttcctgaatgagcgggcggcggactggtacatctgccgcccgccgcttttatgaaagacggttttcattgacgaaacctcaactttgtattatgttatacataggaatcatattgtcaggcgtaaaaggagaaaattatgaacgatacgcccggatatgtgaaaaatttgaaaaaagagtctgtggtgcagagtgtcatcaactgcctgacagacgccatgcgtaataaagagctcaagcccggcgaccgcatcccgcccgagccggagctggccgcgtcgatgggcgttgcccgcagttccgtacgtgaggccattaagatcctctcctacctcggcgtgctggagagcaagcgttcagaggggacttttgtttgcagcggcttccaggagagcatgatcgatccgatgatctacggcatcatcctgaatcaggattccttcgacaacctgatggagctgcgtgagatggtcgagaccggcatcatgcgccttgccagccagaagtatgacgaggaggatggccatgcgctcgaggcgatgctcgaacagatgaaggagatcgtccacagcggcgacaatgaggtcgatcgcttcttcgccgtggacaacgagttccacgacctgatctcgcagatgggcaaaaatccgctggccgacaagatcagccgcgtcgtgcgcacgctgacgcacgccgtccgctacgagaccgtcagcacgatgatcacgagcggcagaggcgacgagctcgtcgccgcgcacagcaagctccttgagatcctcaggggacacgagggagaggacgtggaggagatcgtccgcggcacctacttcggcgatatcatccacggcgaagagaagtaactgaaaatgcaaggcccgccgtcgcatctgcgacggcgggcttttttgacggaaaatcgatagtctcgctgatggaatttgtgcgatttgcggaaatttcccttttcttttgtttgaacctgcgcgatactgtcatcaagaaaatgacggcggctcatccggcaatgacgaatcgagaggagggaaggcgatgtcccatgaaaacggtcccgtacagtccgttgccaaggcgctgcggctgcttgacctgctgatggaggcgcaccagccgctcacgcaggccgcgctgagcgagcagaccggctggccgaagagcacgatccacggccttttgagcacgatgcgcgagagcgcggtcgtggaccggcagagcgacgggcgctactgcctcggcgtgcggctttttgagtacggctgcgccgtgggcgcaagctggagcgtttcagacctggcaaagccgcatttgcagcatttggcaagcgtgacagggcagtcggtgttcctctcattgttgaatcggtcagaggtcatcaccatcgaacaggtgcagtcccgcgcgggactgcgcgtcgtgtcggaggtcgggacgcgtctgccgctgcactgcacctcgcagggcaaggtgtttctatccgcgatggccgaccacgaggcgaagcgcgtcctgtcgcgccgcacattggagccctatacgcccaagaccctcgtcacgtgggaggagctcttccgtgtgatgcaggccgcgcgtgaaaacggctatgccgtggaggagggcgagtaccgcttcgccctccgcgcccgtgcgcgacagctccggcgcggtgcgctacgccgtcggctttgtcggcatgttcgacagtgtgcgtttgccggatttccagcgcgatattgacttgacctgcgccgcggcggcgcagatctcaacggcgctcggctatcgggcgtaagcagaggaattttgtgccgcggagggcggcaatatcagaatggaacaggggcggagacgcaatggcaatcaaacgcaaattcccgccccgcgtggcgacggtctattgcagcggcggctgccgcgcaaaaacggatgaggacggtgcgctcctgtgcgcgtacggctgcatcggctgtgaggtgtgcgtcaacgcctgccgcttcgacgccatccacttaaacgagttcggttgtgccgaggtcgacgacgaaaagtgcatcggttgcggcgcatgcgcgcgcaagtgcccgcgcggcattatccgtctgcgcttgctggacgaccgcattcaaccgctgtgctcgaatctcaacaagggcttcgacgcggcgacaaagaccggcgcgcgcacggtctgcgatgtgagctgcattgcctgtggcctgtgcgtgaagaattgtcccgcagacgccattcatattgagcagttccacgctgtgatcgacgcagcgcgctgcctgagctgcggggcgtgcgcggtggtctgcccgcgccatgtcatcaaggaccgcttcggcgtgctgacgccggtgcactgagttgtatataaaaaaggctcctgaggaatttcctcaggagcctttttgtatgcccaaaatttgggtcacatgctggtatagtggctggggtcgcgcggcagacacagatcgaggatcaggcccacgacgaacacgcccgcgaccatattgcccgcgaagatgtcgccgatgaagctcggcagctcgttgaaaaagccgttgacctgcgtgacgccgacgccgaggcagatggaggttgcagcgatgagcgtgttgcgttggtccatagcccatgggcagcatatagatcccgccgttataggatacgtcgcgcagtctcgacggggtgtagttgtccatgaaatcatagcccgacaggtcgagaaaatcgccttcatcgtccatgcggcccggcgtatagtaggtcgtgctgtaaatatcgggcagctcgccggaaaggcgcatatccttcatataggaagaggtgttttccccgttgtaggggatgatctcgagattgatctccggatacttttcatgcaccagatcgtagaactgggacatattgcggtagagagcgttcatcgtgatgaccttatgctcgccgggggcggtattgtcatcactcgtgttgttgccagcacagccgccaagcagcgccgccgtgcagctcaacgctaaaatcaggctgagcactctttttttcggcatgattttctcccttgatccgatggtgccgccgcactctttcggaatgtggaggagcagcgcgcggcaagatcgcgtgcgaggtgagccgcaggtatgaatttcgccgcaaatttgttaagaaatcgacaaagtttactttactatacgccgaaggagcagttattgcaaggaagaaacggaaatttacgcaaaatgcgccgcttttttacatatatttttcccgtgcgatacgagaattgttcatactttatttacaccaaatttaggttcgcttaaagaatccacgttatacttcagccatagcctaaaacaaagggcgacaaacaaaaaattctggggtccactgtccacctcgccgaacggccaaagcggcagaccaagaaaaccaccgcggcgcggtgttatgataaagatcaaggatcagtgcaagcaaacagcaccggcgagagttttccatctttctctcgccggtgctgcattttacattttgagcttaattcgctgcgggggccttttcaaattctgccgcgacctgctcgagcagtttgcggatggggaggtgctgcgggcagaccttttcgcacttgccgcactttaagcagtcggacgccttgcggcccggcgcggtgtggacatcttcatagtagcagtccgcgttccagtcgtggtgaatctgcttggtgttcataatggcgaagaggtcagggatagagatgtgcttggggcagccgtccgtgcagtagcggcaggccgtgcaggggatgaggttcttgctgtggaagatctcctgcaccttttccaccgcggcgcgctcggtctcgtcgaagggcttgaagtcccgcatgaacgagatgttgtcctgcatctgctccatgttgctcatgccggagagcaccatcatcatgccggggaagcccgcgacaaagcggatggcgtagctcgcggggctgccgccgtgcaggtcttcaagcacggcctttgcgttctcaggcaggttcacgaggttgccgcccttgacgggctccatgacgatgacgggcttattgaatttgcggcagacctcgtagcacttgcggctctgcaccgcgggatcgtcgtagtcgacgtagttgaactggatctggacaacttcgatctcgggatactcggtcagaatgcgctcgagcacctcggcacggtcgtggaaggaaatgccgacgtggcgaattttgccctcttttttgagctcgaacgccgtctcatacgcgcggcactccttgaagtggtcatagttgacaagaccctgcgagtgcatcagatagaagtcgaaatactcgacgccgcagatctcgagctggctctcgaaaaacgggcggatgtctgcctcggtcttgaaatagttcgccgtcagcttgtcggtcaggatgtacttctcgcgcggatagcggcttgtcaggcaggtcttgagcgccttttcgctcttgccctggatgtagccgtgcgcagtgtcaaaatagttgaagcccgcgtctaaaaacgcgtccaccatctgcttggtctgctcgatatccacctcttcgccgatcatcggcaggcgcatgcagccaaagccaaaattcttcttgatccgatccatagtttactttcctattcttatccttatccttttccttttcctgcttgccggcagaaaagtagtttacctttactcctgcggaatcgtcttgagttcgcgccggatggcgcggaagcgctcgggtacgtcctcgtccgccatatcccttgggacgtcgatcgtgcccgcggcctttgcagtttcataataccagcatttgtactccacggtctcgagcgtgtggcgcatctcctccatctgcgcgagcagcacgtcgcgctggtgcgtgaacatcttgaggcgcgtgtcgatggtgtcgtcgccgcgcagggcgagctcgatgtactggcggatgtccctgatggacatgccggcctttttcatgcagccgatgacctgtaaccactcgaagtccgattcctgaaacatgcggatgccgccggacgagcgctccacaaagggcagcagaccctccttatcgtaatagcgcagcgtggaagcggggacgtccagctttttcgccatctcgccgactgtgtagaccatgaaattcctctcgaaatgaaagtgcgctttaagttgcagcacagtgagtaactttaagtttcttttagcataccgcagcgaaggaagactgtcaagcgccgcaaaaaaagaaaagccgccgaaggcggcttttcctcaaatcttcaagatcgcgcgaatgtcgtccagcatttcggcaaagtagatgccctcctgccgctcgggcgtggagaggcccatgtcgatcatgtgggcgagcagggctttcaagtggtcgtaatatccgttcaggttatagaggatgcacggcgcggcgagctgcttgagcgacaccttcgacatgacctcgctgatctcctcgagcgtacccgtgccgccggggaaggcgatgaacgcgtcgccgagctcgatcatcttcgttttgcgctcggccatgtcgcgcgtgacgatgagcgtcgtgatctcgtcatactggtagccctcatcgatgaaaaactgcggctccacgccggtcactttgccgcctgcgcgcagcacactttcagcgagcgcacccatcaggccgtttttcgacccgccgtagacaagggcgttgccgctcttgccgatgagacggcccagttcacgcacagacgattcgagcgtcggatcattgccgctgctcgcgccgagatatacggtgatattcatagaaagaagttcctttctgtccaaaatcgttgccgctattctaccacggtatgatctttcccgcaagcggcgaaaaatcggcgttgcgggcgtagtcctgctgtggtatgatgttctcgccgcgcacgcggaaaaagagtaattttgactgtttttggagatatcttatgatgaaaacgattttgtgggacgtggaccgcacgctgctggactttgacgccgccgagcgcgccgccatccagagcctttttgttgagttcggccttggcaaatgctcggaagaacaggtcgcgcgctattccgtcctgaatatgaaatactgggaaaaactcgagcgcggcgagatcacgaagccgcaggtgctcgtcggccgctttgaggagtttttcgcggaggagggcatcgacgtttccctcgcgacgcagtttaacgatgcctaccagctgcgtctgggcgacaccatcgtctaccgcgacgacagctatgagatcgtcaagtcgctgcgcggcaaggtgcgccagtgcgtcgtctcgaacggcacggtcgtcgcgcagacgaagaagctgacgcgctccggcctcggcgtgctgatggacggcgtgttcctctccgagcagcttggcgcggagaagccgaaaaaggagtttttcgacaaggtcttcgccgccattgggccggtcgagaagagcgagacgatgatcgtaggcgattcgctcacgagcgacatccgcggcggcgacaacgcgggcattgtcacctgctggtacaatcccgagggaatcaaagcgccggagggttaccgcatcgaccacgagatcagggatctgcacgaggtctacggcctgctgtgacaagaaaagggaagaggacattccgaaaagaatcggaatgtcctcttttttgcgtttactgcttgtccttcagccgccgcatgcagatgcagagcgtcttgacgtcgaagggcttggagatgtgcgcatccataccggcctcgcggctgtgctgcacatatataacgcagtgcattgataaaactatggttttattaagtatttatacagtaaaaataaagatgagagtaactttttacttgccagacggcagggaatatgctacaatatgaccaataaaccgaattggtcaaaaatttcaacaaaggaggaaacgccaatggccttttccgcagaagagaacacggccatccgcgaaacgctgctgcgagaggcgcgccgctgcgccgtcacgctggggctgcgcaagacctcggtcgagcagttgaccgaggcagcgggcatctcgaagggactgttctataaatactttgcgtccaaggagctgctgtttttcgaggtgctggaggatatccacagcgaggtctatcagatggccgagcaggcgctggaggagggcaaagacctgccgcccgacgagcgcatcgcgaacgtgctgctcacggcctgcagccgcttatccgagatcggtgcgatgaaattcatcgaggaggactcggcctatctgctacgccgcatccccgcgcaggtgaaagccgagcactatcacagcgacgaggtacatatccgcgaccttttggaggagagcggcctgaccccgcgcggcggcatcgcgctcgccgcggcgacgatccgcggcctgatcctcacggtgtcgcatcaggagcagatcggcgcgctgtatccgcaggtgctcgaaacgctgacgcgcggcgcgtgcgaagagctgttcccgcggacgtgagcgccgcttacggctttttatcacttgaagttagagacgttaaactgaaaaccaaaacagggaggaatctgccgtgtccaagcaagctaccgaatttcagaaaaaagaaatgagcaagatgtaccgcggcaaggagatcttcaagccgctgaacaccggctgggtcgatgaacatgtcgcctgcgtgcgcgaatgggtggcgaacatctttttctaccgcaagggcgagacgaccatcatggtcgacgcgggctacaactataaccgtcttgaggaaaagatgggctggctcggcatcgacccgaagtccatccgccatatcctcatcacccatcaggacaccgaccatgtcggcgcggtggaggcggacagccccggccttttccgtgacgcgaagctctatatcggcgagatcgagaacaaatatctcaccggcaaggtgcgccgcaaggtgatctaccacctctacaagctgccgcaggtgaccattaacaacgaaaaggtgctgctgcacgatgggcaggtcttcgagatcaacggcatcaagatcgaatgctttttggtccctggccacacgtgggggcatatggtgtacctcattgacgacaggtacctcttcacgggcgatacaatctggttcggcgcggacggcggctacagcttcatttccgcgctggcggagagcaacaagctcgcagtcaagtcgctggcggaattggagcagaagcttcgcccgtgcggcctgcggcccgtcatcctgacgggccacaccggctggacggacgatctctacttcgcctttgcgcaccgcgataagctctgctcgccatttaagaaaaaggtgcacgacccgtccgcgccctacgacgcctacgacgagtcagacgacacggaggagaacgccaagcgcggctttttgccgccggtgcagaagatctgatgcggagcggagagaggcggtttttcccgcctctctccgcggttttggtgaataaaaagagtaaagcgtgcgcatctatattcttacattttcttttctcatgccacttgcgaaaacctaatagacatgataaaatcaactgatcaaacggacgccgcaaggcgcccgtttgacaaatgagagaagagagattttaagaagagagagggaaaaccaatggaacatcagcgcagggcagatctcatgctgctgctggcgacgagcttctggggcatttccaactgcctgacggcgatctgtctgagggatatgcagccgttgacgctcaatgcgtttcgctttgtcacggcctttttggtgctgggctttgtttttcgaaagaatttgcgccgcgtgagccgcgtgaccgtgaagtacagtattctggtcggactgtcgctcgtcatcgtgtatacgagccttacctacggtgtgctctatacctccgtttccaacgcgggcttcatcggcgcgctttcggtggtgacgacgccgatcctggagttcttcatctaccgcaaaaagccagagaagaaattcggcgtttcgatgatcttatgtcttatcggcttagcgctgatgacgctgaatgagacgctcaagcccgcgttcggcgatatcatctgcctgttcgcagcggtgttttactccgtcgacctgatggtcacggaaaaggccgtggcgaatgaaaaggtcgacccgctggcgctcggcgtatgcgacctcgccgtcgtcggcgtggtgatgctgatgctctccgtatttttggagacgcctgcactgccgggtacggcaaaggtctgggcggcggcgctgtttctcggcatcgtgtgttcaggcgtctgccttgtgatccagagcgtttatcaaaagcacacgacggcgagccgcgcgagtctcatctttacgctcgaacccgtgttttcggcgatttttgcgttctttctgctgggcgagcgcatcggcgtcaagggctacatcggcgcggcgctgatgcttgcgagccttgtgctggtggaggtcgacgtgggcgcgctgtttggaaagaacaagaaaaaagcggactaaatcctctttgccacgtttggttgcggacttgcaagccttgactggtggcgcttttcgccgcagtcggctatactgggcgcatcaaagcaaacggaggacaaatacatgaccctgggagaaaaattacagctattgcgcagatcgcgcggtttatcgcaggagcagctcgccgcggagctggatgtctcgcggcaggccatcagcaaatgggaatgcggcgactcgacgcccgacctcgacaagctgcgcgccatctgcacgtacttcggtgtgacgacggattatctgatctgggaaagatcggaggacgcgccgcaggcagccgagcagaagcagggtggcgatacgcgcggacggagcggtatattcaacgatgcgctgctgctggtgatgacgattgttgtgatggcagcggtgtggagcgttgcgcggacgggattcgagtcgtatacggcgctgcacttcgtccttggtgcaatggcgatagccgccgctgtgctggcctgtacggtttggaaaaagcgcggcagaccgatctgttttggcattgccgcagccggtgcggcgctggcgatcgcccgcctggcctctatgcttggttatctggtggatctgtggtcgacgtcgagagagtatgcggacgggggcgactggccgatcgtttgggagagcgcggggatatggctgcggcacgactggccctactatctattctatcttgtcctgatcgtgggcggttttttgctcgcgcggcgactcaaaaagaaggagaaggcgaatgacgacctttgacaaagtgtacgcggcggtgcggctcattccgcgcggcagcgttgcgacctacgggcagatcgctgaggcgatcggaaacaagcgccttgcccgcgtcgtgggctatgcgctgcacgtgaatcccgagccggacgttatcccgtgccaccgcgtcgtcaagcgggacggggaagtgtcgagtgcatttgccttcgggggcgcgaaccgtcaggtcgagcttttgaaggccgaaggcgtcggctttttagacgacagccatgtcgacatgaagcactactgcgtccgcgccctgccgctcattttggaagagtaaaaaagaagcgttccttttggagcgcttctttttgcttacagaaatcggcacaataagatcggcaggaacaccgcagggacgtagttcatcaccttgatcttcgtcaggcccagcatgttgagcgacaggccgaggatcagaatcgagccgacgcacttcatctcgaggatgaccgcttctgtgagatacggcgcgaggaacgacgcacccagcgcgatggcaccctgatagaggaagatagggatagctgaaagcgcgacgccgatgccgagggtcgaggcgtagacgacagaaatgatgccgtcgagcagcgccttggcgtagagcgtcgaatggtcgccggtcaggccggagtcgagtgcgcccatgatggccattgcgcccacgcagaagaggagcgaggccgtgacaaagccctcggaaagcgaggttttcgacccttttccgccaaattttcgctcgacccagtcgccgagctgatgcatgtgttcatcgagctgtaaaagttcgccgaggatcgcgccgatcgcaatcgaaaggatggcgacgagcgtgttttcgcccgcgagcatgccgtccacgccgatgtagagcacgcagagcgccgcgcccttttccattgcgtcgctgaagcgctcggggataaacttgccgagcagaagtccggcgatgctgcccgcgacgatcgcggcggaattgacgatggtaccggtcaaaatcattggttgccgccttctttctcgtacccggcaagcgtcaggataacgtcgcccgccatcatcagccccgcgcagccggggacccacgttaagctggccggtacactgcggcggcccggcgggggcgcttccagtgcttcgggctttgcgggcagctctggggagtagatcacgcgcaggtgcttgacgccgcgctcgcgcagctcttttcgcatcacgcgtgcgagtgagcagttacgcgttttggaaatgtccgtgatgcatagctgcgaagcatccagcttgttccccgtgcccatggcggagaggatggggatgccatgtgcctgcgcggtctggatgaggtcgagcttgctcgacaccgtgtcgatcgcgtcgaggatgtagtcatagcgcgcggcgaagaagtcctcgcggtgtacagcgtcgtagcgcgcacagatgaggtgcagtctgacatcggggttgatgtcgcggcaacgcgcggcgagcgcgtcggtcttattttggccaacggtggagtgcagtgcctcgagctgacggttcaaattcgtggggctgacagtgtcatcgtcgatgagtgtcagctcgccgacgcctgagcgcaccagcgcctcgaccgcgtagctgcccacgccgccaaggccgaatacggccacatggctgtgccgcagggcgtccatcgcatcgccgccgaggagcatctgcgtgcgtaaaaactgattgtccatagtgtcgcctcaaaagtcagaatcaaaaagaaataagctgccggtcagaaaccggcagcttattttgtcgtaagtagggagatttacccgacgtacttcatgccgctgagctgctcggcctccacaccatcggtgatggcagagtaccactcgttgtaggcgtcgctcttgagggaggactccgcctggtcgtaccagtaggggttctcgctctggccgacgaagtacatcacgtgatagccgtagctcgtctgcacgatgccggtgtcgcccgcctgacgggaggaatcgaagcaccaatcctcaaactcgctgaccatctggccgcggtagatatcggtgtacaggccgccggaggaggcgttggagtcggtggagttggcgacggccagggcggcaaaggcgtcctcggtctgctcgccgtcgttgtactgctgcaggagctcgttggccttctcctcgctgtcaacaaggatatgacgcacggaaaccgtgtgatagtcgttgcggctgcgggagtggaagagcacagcgtaatagccggtctcgccataggcggcgacggtggtgtcgccctcctgacgggcatcgtcaaacgcccaggtcagcatatcggaagcgccgttcgcggcataggcgacatgcgcataggagccttccatatcctcgccgatggcatcgaacgcctcgccctgcgcgtagcgggaaagggcggtctcggccttctgcttggcctcatcaagaagctgggccttctcctcgtcggtcgcatcgctgccggcgccggagctgaagaggatgtactcgatgtcagcgctctgatagctcttggggtcggcgtcataagcggcctgcacctcgtcggaggtgtaggacagggagtcagagtagctgttggagtaagcctgcgcgagcgccatcatgcggatgttgcgctcgaagaccttctcgttgaccagcgggccgcagacggccttgatgtactgcgcgcgggtgtaaccggcggaagatgcggaagcatccagatcggagagcgtctcctgcacggactgctccacttcctcgctggcgtcaaagccctcagcctcggccttctgcgcgagaagcgaataggaggtcatgctgctgagtgcctgatcgcgaaaataatcgtaccaggtgccgccatcggtcacggggcagtcctgctccttgagcgacttgctggtgtcgagaccgtaaacgctcagatagtaggagttctgggagacgaagctgttgtagatggtattgtagaagtagctcacgtcggcggccgtgtaggtctcgttgccgatggtcacggcgtcggcgctgcgttcgatcaccttggagttggcgaccgtgacgacgataccgacgatcacgaagatgacggcgatggcgatatacagggcattgctgcggcgatccttcgcctgctcgtccttttcgcgcttcgtccggggatcgacataaccgcctgccagattctcctggcggctcttcttttctctggatgcactcatttgtttgttcagtcctctcaattattgggttttgcagatttgcaaaggtgctattgaaaatgcccaatcattataacgaatggaacacaataatgcaatgacaaaattgtgaagattcttcgtaccattttccgcccgcaggcggaaaacaattaaaatcgtaattcctgacgacatgtgcgtcaggaattactctttgcgcaaagcgagtgtcgaattgtctgcttgtgcagacaatgaggcacagagcgacgcgaatctttctcaatgaaagcgacgtaagtcggtttcattgaggttacttcgtgccaaaaattctatcgcccgcgtcgccgaggccggggacgatgtagccgtgctcgttgaggtgatcgtcgagtgcgccggcgtagatgttgacgtcggggaacttctcctgaacggtcttgatgccctcgggagcggcgacgagcaccatgagcgtgatgtgcttgcagccgcgcttgaccatctcgccgatggcttcgcaggcagagccgccggtggcgagcatcgggtcgacgatcatcacgtcgcgctcggcaacatccttaggcatcttgcagaagtaggggtggggctcgagcgtctcttcatcgcggtacatgccgatgtggcccacgcgggcggagggcaccatgcgcagcacgccgtcgaccaggccgagaccggcgcgcaggatggggacgacaacgaacttcttgcccgcgagcgtgggggcgtccatctcgcagatgggggtcttgatgtgcttggtggtcagcgggaggtcgcgcgtggcctcgtaggtgatgagcataccgatctcggacacgagctcgcggaaatccttgacgctggtgttttcatcgcgcatgatggtgagcttgtgggcgacgagggggtggttcatgatgtgtactttctcgttgaatttggcttccattgctttgacctccgaaaaaatatattttaatgtgttttgcttactggttcaatttggagcttctcaggcgctctgcctgcgcggggcgcagataaacggggagaagctcctgcgcgctcacggcctcgccgcgcgcataggcgcgctcggccgcaaggccgacgcccacggcgctctgataaaggagcatactgggcgcgagcgagcacttgacgccgtgctcttctaaataacgatagcacagcacgccgccgtcgccgaggacggtgatgggctgctgcttgccttgaagctgcgcgcagagctcttcgagcgagatcgcgcggtccggcgtcaggcgcgtgagttcgccgccctttgcctcgaaaacggcgttatagacctgcgagcggcgcgcgtccatcgcgccgacgataagcccgtcgatgtgcgcggcattctgcgccatggcctcgagcgtcgaaacgccgaggcacggcttgtctgcggcccaggcaaggcccttgaccgccgcaatgccgatgcgaaggcccgtgaacgagcccggccccgccgcgatggcgatggcattgatatcatcgagcgtcagatcggcgtttttgagcatcgcatccaccatcggcaaaagcgtccggctgtgcgtcagccccgtgcactgataggcggaggcgagcggcgcgccgtcttcgacgacggcgcaggaaacgctcttcgccgatgtttccagagcgagaattttcatgcgaatctgcctcctgtgaccgtgatggtgcgccagtcttcgtgctcgtctgtgcgcgcgatgtcgacatagatcgtgttctccggcagcgcgtcggagacgcgctcgctccactcgacggcgcacacgccgccgcgggcgagataatcgtcccagccgatgtcgaacagctcgtccgacgagccgaggcggtacatatcaaaatggaagagcggcgttctgccctcgtactcgttgacgatggtgaacgtcgggctcgtgacgcgtccgcggcagccaaggccgcgcgcaagaccgcgcgtgaaggcggtctttcccatgccgagcgagcctgtgaaggcgagcacatcgccgccgcggagcttttgggcaagctcttcgccgatcgcctcggtctcctgtgtgctgtgcgacagaaattgcatggtttcgcctccttgaccccattttcacccatattaccaaatagtatagcacagcgcgccggcctttacaattccttttctgcggaaagagggagaaatgtgcgtttacagacgggtaaaattgtgctaaaatacatcgaaagctttgtgcgaagggagcgtgaggctgtgaacagattccgcgattttttaagtgatgtggtgcggcagtcggatatggtgctgctgtcgctgtgcaccgtttccacgctctacggcatggtgctcatcgcgagcgccacgcatttccgcaatacctttaaatatgttgccattcagggatttggcttgctgctgggcgtgctgctctacttcctgctctccagcatcgacgtgtcggaggtcggaaaaaaatggaagtggctgctggcgttcaacctcggcttcatcctgctgctgcgcacgccctttggcctgacgcgaaacggcaaccgcgcctggctcggcgtgaacgacatcggcgaaaggctcggcatagccgttctgaagaattttcccatcaccgtccagcccgccgagatcgtgaagatcacgttcattatcctcttggcgcgccagcttgcgctcttgcaggaaaaacgcgacctgcgcagctttacgaacgtcatccagcccacggcgcacgcgggcgcgatgtttgtcttctactatatcctctccaaggacgcgggcagcgggcttgtctatctcttcgtcttcttgtgcatggcctttgccgcgggctttgccctgcggtggatcttcctcggcgtgggcggcgcggtgggcgcgtttctcgccgcgtggaacctcggccttctgcgcggtgactggtacgaccgcatcaaggtcatcctcgaccacagctaccagccggaaaaaaagggctttcagcagacacgcggtatgctcgccctcggctcgggcaagctgacggggcaggggctgttccaaggcacgcagacacaatcatccgctaagtggagccttcccgagcggcagacggacttcatcttctgtgtctgcggcgaggagctgggctttatcggctgccttctcgtcatcgtgctgctgctggccatcattgtccgctgcctcattgtcgcgcgcgaagcgccgagccgcatggagagccttgtgtgcgtcggcatggcgggcatgctgatcttccagaccattgccaacatcggcatgtgcttgttccttatgccggtcatcgggctgacgctgccgtttttcagctacggcggctcgtccatcgtgacgatcttcgccgcgatgggagtggtgtcgggcatcaagaagcgatcgaggccggaatggctcataaactgacgaattcaaaaaaaggagacggacttgtccgtctcctttttttgattgggatcgcactccgcttcgtgccttgccgcctgcggggcggctgcgacacgcgcggagtgagaggtattttcgccacgtacacgccgcggcgaaaaatgattgaaattgctttgcggcgtgcgaggcgcaaaatggggctaatcccgttcgattttttcgccgctgatggtgtcttcggcggtaccgtaggagatgacgccgcggccaaattttttgcgcagggtgtccattgcggattcgacggcttcctgcttttcatgctgtgtgtcgtccgtgccgagcaggtcgagctggcggtaggattgcgcttcttcggtcagatgcagtgccgtgacggagaggagccggatagggtcgggtgctttccacaagtcctttgtaaggcggagcgcggtatcgttgatctcgcgcatcaggtgcgtgctgtggtcgagcgtcgtctggcgcgaaaagacctgaaagcggctgtttttgatgccgacctgcacgccgccgcagtagagaccgtagcgccgtaggcgcatcgccacgctgtcggacagaagcgagatgccgctttgcacttcgtcccagcgcgtcaggtcgcggcggaacgtcgtcgaattgccaacggatttgatcggctcgcggtccgccgctccgcggacgggggagtcgtcgaggccgttggcatagcggtagagctgcgagcccattttgcccatcagggtttcgagcatttcctcgctgcattttgagagttcgccgatcgtgcgcacgccgtagcggccgagcagctcctgtgcgctgcggccgacgaacaaaaggtcaccgacgggcaggggaaagacgatgtcacgccagttgccgcgcgcgatgacggtcgtggcgtcaggctttttatagtcgctgccgagcttggcgaacaccttgttgaatgacacgccgaccgagatcgtcagcccaaattcgcgcttgatgcgctcgcgcagcgtgtcggcgagcgctctggcgtcccctccgaagaggtggagggaatttgtcacatcgagccagctctcgtcgatgccgaacggctcgacgaggtcggtgtactcgccgtagacggcgttgatctttttcgaatattcggcgtagagccggtggtgcggcggcagcaggatgaggccggggcatttctgcttggccttccagatggtctccgccgttttgacgccgcagcgctttgccggttcatttttggccaggatgatgccgtggcgctccgtcggatcgccgcagaccgcgacgggcagcttacgcaaatcgggatgactcaaaagctcgcaggaggcgtaaaagcagttgcagtcgcagtgcagaatgatgcggtccatcgcgttcacctcgtttcacgaacagtgtagcataaaatgcgaaatagaacaagcgtttggaaataaaaagtacccgccgaatggcaggcacttttttgaatgctttgcgtcaattttctctcacgctgtacagcgccgcgccgatggcggtagcaaacgtcgcgttttcgggaataataaaattgacatggtagagctgtttgaacagctcgaacgtctcccttgccggcggcagcatcgtcagcgcgcctgtgaggacgaccgtgtccgtgccgcagcacttgcacgcgagcaccgacattgtgccgatggactggagcaccaggttgacgatgccaagcatcttgtccgacggcgtcgcgtcgtcggcgaccttggcaaagttcgccgccgtggcctcgggcggcaggtcgcccacctgctcgcgcgagaggtcggccatcgtcaggtcgatgtggctgaggtcgccgtcttggcagagcttgcggatcagcgcgtactggtgtacgcctgtcgtcagcgagctgaggcccgcgagcgtgccgccgcccacgccactgccgatgagatggcgaacctctttccctttattggcccaaagaaacgacgtgcccgtgcccatactgacgacgaccgcgtgctccttgcccgagagggcgaggccgcccacgccgacggaggggaattcttcgaccttgatggtcttcacaccgtagatatcgccctcgacatacgaagaacccacgcccgtaagcgcgatatggcggatgtcggagagctgtaaattgtgtgtggaaaggaagttgcccatcgcgccatagagcgaggtgagcggatcgtcagccttgacgcgcagcatgtcgatgaccgagaggtcgggggcaagaccgacgatctttgtgctcgaaccgccgatgtcaatgcctaaaataacacccattgtgatgctccgtttctttagaaagtccctttatcataggggacagagtgcataaagtcaagtaaaaagcggaaaaagggcggaaagccttgctttattttggtatgcaggatataatgcacctattacaaggcgcggcacagtccgcgccgtgacactatgaggtgactatgaaaaccgatcagaagctcaatatgaccatgctctgcgacttttacgagttgaccatgggcaacggttacttgaaagcagggttccaggatcgcattacctatttcgacgtttatttccgctcggtgccggacggaggcgggtacgccattgccgccggtcttgaccagctgatcgactatatcgaggatctgcacttcgaccagcaggacatcgactacctgcgcgggagaggtatcttctgcgaggaattcctcgactatcttgcaaacttccacttcagcggcgacatttacgccgtgcccgagggcacgcccgtcttcccgaaagagccgatggtcgtcgtgcgcgcgcccgcaatcgaggcgcagctgcttgaaacgtttgcgcttttgaccgtgaaccatcagagcttgatcgccaccaaggccaaccgcatcgtccgcgccgccaagggccgcgccgtgatggagttcggttcccgccgcgcgcagggctccgccgccgccatcgacggcgctcgtgctgcctatattgcgggctgctgcggtactgcctgcaccatctccgaccagctctacggcacgccggcgctcggcacgatggcccacgcctgggtacagatgttcgacaccgaatatgacgcgtttgcgacctactgcaagctctacccgcagaacgccgtcctgcttgtcgacacctataataccttaaagtccggcattcccaacgccatcaaggcgttcaacgacgtgctcaagcccatgggcatcaaaaagtgcggcatccgcttggacagtggcgacatcgcctatctttcccgcaaggcacgtaagatgctcgacgaggcgggctggacggagtgcaccatcaccgtttcgaactcgctcgacgagtacctcattcaggacctctggatgcaggatgcgaagatcgacgccttcggcgtcggcgagcgcctcatcaccgccaagagcgagccggtcttcggctgcgtctataagctcgtcgcggtggaggacaaggacggcaatatcgtccccaagatcaagatcagcgagaatgtcggcaagatcacgacaccgcacttcaagaagctttaccgcttctacggccgcgacaccggcaaggccattgccgactatctgacggtctacgacgagaccgtggacgacagccagaatcttgagatcttcgaccccgacgccacgtggaagcgtaaggaagtctatcacttcgaagcgcgcgagctgctcgtgcccatctaccagaaaggcaagctcgtctacaagcgtcccggcatcgaggagatcaaaaaatactgcgccgagcaggtcgataccctctgggacgaggtcaagcgcttcgataacccgcataactattatgtggacctctcgcagaagctctacgacatcaagaccgagcttttgaacgagaagaacgagcgctacgagaagaactgaggaaaacaaaaaatcaaaaacagggaacagccaacaggaggggactgagactgcgatgaagggattccagattcagcaaaagggcgagcggcgcatttctgcggcgctgcggatcatgctggtcgtcgtcctgcttgcggtgcagatcggctttgttgtcgccatctcctactttatgcaggagtatctggcgctggcctacggcgtcgtacaggtcggcgcgctgttccttgcggtgcatatctacaatgaaccaggtgagctttcctataagctcatctggttcatcctgcttttgctggccccgccggtgggtatgattctctggttcctctggggcggcgcggcgcagaagcgccatctgccgcggaacaccaagcgctttcctgacgagccggagagcgtgcgcatgcgcagtgagatcgccgtcgacaagctcacgcgccagctgcccgcttggtcgcgcacggcaaactacctctgccgccgcgacttccagctctatcagaatacctctgtcacgtacctgcccgagggcgcgattttgctgcgtaatctcattgaccgcgcagccaaggcggagcgctttattttccttgaatacttcattctggctgagggaaagctctgggatgagcttgaaaagatcctctgcgccaaggcgcgcgagggggttgaggtcaagattattttcgacgacttcggcaacatcaagcgcttccgcggcgagacgatcgaccgtctgcgcgaggtgggcgtcgaggtattcatcttcaaccccgtgcacgagtatgtgaaccgcctgcacttcaactaccgcgaccaccgcaagatcgcctgcatcgacggtgacgtcgcctacaccggcggcgtgaacatcgccgacgagtacgccaatatcatcgagcgcttcggctactggaaggacagcggcgtatgtcttgaaggcgagggcgcctggggcctgacggcaagctttatccgcatgtgtgtgaacctcggcggcgtgatgcacaacgagcacgactattaccgcccccatacgccggtcaaaagcgagggcttctgccagccgtttaccgacggaccgcagaacaaccccgacaatccggccgaggatgtgttcctccagatgatctccggcgcgcggcgcttcctctatatcacgacgccgtacttcatccccgatgagagcctgatgcgtgcattgtgcatcgcgggtgacgggggcgtggacgtgcggctgatgctgccgggcaagcctgaccactggtacgccgactgcgtggcggagtcgtactttggcgagctcatcaaacacggcgtaaaggtataccgctatacccctggctttctgcatggaaaaaccatcatggtggaccgcgtagcggcctttgtcggctcggtgaatatggactaccgcagctttgagctcgactatgagtgcggcgtgatggtctacggcgcgccgatgatcgaatcgctgctcgaggatatggatatgatcgtcgaccacagccgtctcgtcacaaaagaggagtgggctaagcgcagcgtactgcgccgcgtgttcgagccgctgctgcgcttgtttgccatctggatgtgacaggaaaatggggaagaggcaggaattttccaaattttgattttttagaaaatttcctgttgacaaatgcaaagttcctgctataataacatttgttcgctgaacgacacagcgcggcgaacaacgcaatatagcgggattgtgtaatggtagcacagcggactctgactccgtatgtgagggttcgaatccttctcccgctgccactgagaagtctgaaaccgtaaggtttcggacttcttttttctgtttgaccctttatctgaccctttaaccgttttgcagctccttcccacagatggcgtgctgcatataggcttccattcgatttgcactgtcctgtttcagcaccagtgaaaaaagggcaagggaaaagctcctcaacgcttttcccttgcccttttgcatctgtcatggtgtacagcttagcaccggttatttgagtggctcctcgccgcggtgcagatcattccaatcgctgacgaattcgtcgggggtccagtcgatgtcatcgttttcggggtgcgagatcagattgtcggccgcggcggcgatggtggcagcttcgccgcggggcagggacgagaggtatctgatgcggatgtcgctgacgaggtcccagtaggcggcgcgggcaaaggtgtcgatattcgcagccttgatgccgagaaggccgacgagaggttcctgctcgtgtgcgtcatactggtcctgaatcgtctcgaaaatatcgcccgcgtcgccgccgtacttggtcagaagagaaatgaggttcgtttcgggaaaaagctcctgaaagcgcgcgaaaacggaagtggtagccataattgttctccttgcaagatcattttgttgcctatagtgtcacacaacggggcgtaaaagtcaacatggatgaaatcacttactgcgcgggccgcgattctggtcatgcggcggttgacagtgccggtccactcgtgctatgatacaaaaaccaacaatcatactatgtttgtggatgtaaaaggcgtaacgcagacatttttccaacgtcaggcgaaggatcggcgagagccgataagaatagcttgacgatcaatctgcttgaatttttcaaaatcggggagagagtatgctcaatcagttttcaagaacgcagctgcttttaggtcaggatggcatggagcggctgtacaacgcccgcgtagccgtgttcggcatcggcggcgtgggcggctacacggtggaggcgctggtgcgcagcggcgtcggcacgctggacctcatcgacgacgaccgggtgtgcctgacgaacgtgaaccgccagatcttcgccacacgcaagaccgtgggacagtacaaggtggacgtggcggaggaacgcatcaaggagatcaacccaaacgcagttgttcacacttacaagacgttttacgcgccgcagacggcggatcaatttgacttcacgcagtatgactacatcgtggacgccatcgacaccgtgaccggcaagctggagctcatcgagcaggcgcagagagcgggaacgcccatcatcagcagcatgggcgcggggaacaagatggacgcgtccgcgttcgaggtgacggacatctacaagacctctgtctgtccgctggcgagagtgatgcgccgcgagctcaaaaagcgcggcatcaaaaagctgaaggtcgtctactccaaagagccgcccatcacgccgctggacgacatgtccatcagttgccggacacactgcatctgcccgccgggcacggcgcgcaagtgcacgcagcggcggcaggttccgggcagcaatgcctttgtgcccgccgcggtcggcctgatcgtcgcgggcgaggtcgtcaaggacctgaccgcgtgggagagaccgttatgatctatcttgattactccgccaacacgccggcagaccctaccgtgctggacgcgttttatcaaacggagcggcgctatatcggaaaccccaattccacccaccccgcagggcgggcagcgcaggcggaaatggcccgggtgacggacggcatcgcggaacttctgggcgcagcgcccgaggagatcatctacacctccggcgcgagcgaatccaacaaccttgcgctcaagggcatcgtgcaggcgtcccgccatgtgggaaagcacatcatttccacggcgctggagcattcctctgtgggcggtgcgctgtccgcgctccagcagcagggctgcgaggtcgaccttgtggacatccggcgggacggcaccattgatttggaacatctgcgcgagcttttgcgaaaggacacggtgctcgtcgccgtctgcgcggtggacagcgaactcggcacggtgcagccgatccaagagatcgcggatattttgagagactatcccaactgccgcctccatgtggacgcgacgcaggccgtggggaagaccaagctggtgctcttcggtgtggacacaatgagcatcgcgccgcacaagttttacggcctgaacggtagcggcctgctggtcaaaaagaaggaccttgtcatcgagccgcagatccacggcggcggcagcaccacgccctatcgcagcggcacgcccgcactgggcatggcgatgtcgatcgagaaggcgctgcgtttggcgatcgaaaatcagaacgagcgcatcgcacacattgcggcgctgaatcgtctgctgcgcgcggagcttgcgaagtatccaaaagtccgcttcaacagtccggaaaacgccgtgccgcacattttgaatctgagcgtcaacggcgtcaaggggacggcttttcagcaggagctgggaaaaaatgatgtctgcgtgtccgtgaagtccgcctgctcggtggaggggacgccgtccaaggcggtctacgcggtgagccgcgaccggaaaaacgcgctatcctcgtggcgcatcagcctcagccacctgacaacagaggcggaaatcgcggaatttctgcaaatttttgaccgctgctatcgggagcttgcgcaatgaacgctccgccgcggcggaagcgattagagaagagggagttatccatgccaagaacgttagagccctatcagatgatcgagcggagcatcatcaaaaaataccgcgacgagctgtggaaaccgtttgtctatgcggtgaaaaaatatgaactcattcaggcgggggacaagatcgccgtgtgcatctccggcggcaaggactcgatgctgatggcaaagctcatgcaggagctttaccgccacagcgacgtgccgtttgagctggtgttcctcgtcatggacccaggctacaacgccatcaaccgccagcgcatcgagagcaacgcggcgctgctgcacatccccatcacggtattcgagaccaatatcttcgaggtggccaacagcacggacaaatcgccctgctacctctgcgcccgcatgcggcgcggccacctttacagcaaggccaaggaactcggctgcaacaagatcgcgctgggccatcactttaacgatgtgatcgagacgacggtgatgggcatgttttacggctcgcagatgcaggccatgctgccaaagctccacagcgacaactttgagggcatggagctcatccgcccgatgtactgcatccacgaggagaacatcatcgcctggcggcagtacaaccagcttgagttcatccagtgcgcctgtcgctttacagaaaactgcaccatctgcgacaacggtgggggcggctcgaagcgtcaggagatcaagaccctgctgcgccgcttaaagcgggacaaccccaacatcgaaaaatccatcttcaacagcatccacaccgtcgcgctcgacaccttccccggctacaagacaaagggagaagtgcattcgtttttggagcattacgatcaatgagcaggtgagagaggaacggaaaattcggcaaaggccgaattctcgccctgctttgcttgaagaaaaaagaagcatttgccacagcatgcggcaaatgcttctttttattattgctttgattcgaaatccggcggagcgaccgcgttacgacagctcgtccccgtccagcagggcctctttcagcgtgcgccagccgagcaccgcgcatttgacacgtgcgggcatgtgggcgatatcacggagagccgaggcctcttccaggctgtcgatctcgtcttctgacgcctcgccctggatcattttcaggaagatctcgcccattttcagcgcgtcttccttctttttgccgacgatcatgccgagcatgatgtccgccgacgcctgcgagatggcgcagccgtcaccgacgaacgcgccgtccgcgatcacatcgccgtcaagcttcagcttgaggaagatgtcgtcgccgcagctcgggttgacgccctcgagcacgatgtcggcgtccggaaggtcgtgcttgaactccggatgcaggttgtgctcggtgagaatttcattgtaaaagcttctattttccataacccattcgctcccttagcgtggaaatgctgtcaagcagccggtcgacttcggattccgtgttataaaacgcgaggcttgcccgcgcggtggacggatgcttcaaataggccagaagcggctgcgcgcagtgatggcctgcgcggatggcgacgccgtcgctcgcgaggatctcactgatgtcgtgcgggtgaacaccgtccaccgtaaaggtgatgatgccgcagtgctcctcgggcttttccgagcccagcacgtggacgtgcggcatttcgcggatcgcgtccatcgcgcggcgtgtcagcgcgacctcttgctgatgcatcgctgtaaagccgatgctcttgacatagtcaatggccgcatgcaggcccacggcgcctgccgcgttgaccgtgccggcctcgaacttgtgcggcagctcggcaaagaccgcaccatcgcgggtgacagattcaatcatctcgccgccggtgaggaacggcggcatggcgttcagcaattcttcacgtccgtagagaacgccgatgcccatggggccgtagaccttgtggccggagaaggcgaagaaatccgcgtccaatgcttgcacgtccaccggaatgtgcggcgtgctctgcgcgccgtcgacgaccagcaccgcgccggcgcggtgtgccagcgccgcgagctcgcggatgggattcacgcggcctaagacgttcgaaacgtgcgtgcaggcgacgatctttgttttcggcgtgatgagggcttcgaccttatttaagtccagcgtgccgtccatttcgcattccatgaatttgagcgtcgcgccggtctggcggcagaccatctgccaggggagcaggttgctgtggtgctccatgatggagacgagcacctcgtccccggccttcacgtgggagaggccgtagctgtaagccactaaattgatgctctcggtggtgttgcgggtgaagataatctcgcggctgctcttcgcgttcagaaaggaccgaacggcctcgcgcgcgttttcgtaagcctccgtcgcggcgatgctcaggggatagaggccgcgcaaggggttggcgttcttacttttataaaactccgttacggcgtccagcacacactgcgggcgctgcgccgtcgcggcgttgtccagatacgcaacatcctgactcttaagcagggggaagtcgtcccgatatgcatgcgtcatcttacagcacctcctcaagctcggagaggatcgcggcctgcgccgcttcatcctcgatcgtgcgggccagccgctcgatggcggcgcgggccatgatgttttccgcctccgctgcggaaatgccgcggctttcaaagtagaacagcgtgtcctcgtccagctcgccgatggtcgcgccgtggttgccgacgacgttttcctcggcgcagaggatcagcggcaccgtcttgttgacgacgccgtcgcccagcatcaaaaccgtctcctgctcgctgccaacggaacccgcggagcccttcttaaagtcgatggtcccgcgaaagatcttctgcgcgtcgtccttgagcgcaccggcggcattgatttcgctcgtggtcttctggccccagtggttcacgacaaggttcatgtccacggtctgctgcttctggcccagatacccgatgcccgccgtgaagcccgcgccgttgccgttcagctcgaactggccgtcgctgtacacgtcgccgcggcccagcaggacctggatcagctctacctgaccgttttcggcgcactcgccgctcgtctccagacgaagaagcgagtcctgcgccgcgttctggatctgtacgagccgcacctttgcgtccttttcaacgtggagcgccgtgcgcacgagcaggcccttttccgctctcagcgtttcaaacaccgtgacggtctggcccgcgggcacgtggatgtccaccatcttctcgccgcgctcgccggagccagtgatctcaagccgctcggtctgaccggcggcggtgattttctcttcgcccaaatcgtcggcctgtccccaggtaagggccgtttcgttcacacccagccggttccaggtacgggtcgggagccggttgatcaaaatcgtatcgttcatgtccaaactcctttcagccaatgctgcccttcatctcgagccggatgaggttgttcatttccaccgcgtactccaccggcagctccttggagacattgtcggcaaagccgctgacgatcatcgcgcgcgcgtcttcctcgctcatgccgcggctcatcagataaaagacggcttcgttgctgatcgcgccgatcttcgcctcatggccgatggccgcgtccttcgtgcggatatccattgcggggatggtgtcggagcgggactcggagtccagcatcagcgactggcacgacacggcggacttggcgcccttggcgcccttttccacgacgacgctcgagcggaacgtgctgatgccgccgctcttgctgatcgagcgcgtgttcatataggagctcgtatttttgcccacatggacgacctttgcgccggtatcgaggttctgccccgcaccggcgaacgtaacgccggtgaactccatgcgggaattgtcgccctttaagatgctcatggggtacaggcagccaacatgggagccgaaggagccggagatccattcgatcgtgccgccctcttccaccagcgcacgcttggtattcaggttgtacatgttcttcgaccagttttcgatcgtcgagtagcggagtttggcccccttcttgacgtacagctccacgcagccggcgtggaggttcgccacgttgtacttcggcgcggagcagccctcaatgaagtgcaggctcgcgccctcgtccacgatgatgagcgtgtgctcaaactggccagcgcccttggcattcaagcggaagtaggactgcaggggaatggagaggtgtacgcccttgggcacgtacacgaacgagccgccggaccacaccgcgccgtggagcgccgcgaacttgtgatcgtggggcgtcacgagcttcatgaagtacttgcgcaccatgtcggcatattcgccctttatggcgctctccatatcggtgtaaaccacgccttcggccgccacggaatccttgacgttgtgatagacaagctcggagtcgtactgtgcacccacaccggcgagggattttctctccgcctgcgggatgccaaggcgctcgaaggtctccttgatgtcctccggcacgtccttccagtcgttgcgcatcttggtgttcgggcgaacgtaggtcgcgatatgatccatatcaaggccctcaattgacgggctccagttggggatcttcatttcattgtagatctggagggattcgagccggaactgctgcatccacacgggatcgtccttctccttggagagcttttcgacgatctccggcgtcaggccggattccatgcggtacgcgtcgttttccgcatcccgaatgtcgtagacactgcggtccacatcctccacgtaggttttttctttcaaatctgccatgtcaagagcctcccgattcagtcttccttcaggctgctgaatcccttttcgttgatctcatccaccagttcggcgccgccgttgcggacgatgacgccgtcttccatcacgtgggccgcatccacatggagcgcttccagaatgcgcgtggagtgggtgatgatgagaagcgagccgtgcgtccgctcgcggaacaggcgcacgccctcgctgacggtgcggaccgcgtcgacgtcgaggccggagtcggtctcatcgagaatcgcgagcttgggctcgagcatgagcatctgcaaaatttcggctttcttcttctcgccgccggaaaagcccacgttcaggtcgcgctcggcgtagctctcgtccatgttcaaaaggaccatggtctctttgagctttttcttgaagtcccacaggcgcaggcggtcgccggtcttctgctcgagcgcgctgcggatgaacgcgctcagcgttacgccggggacctccagcgggttctggaaggacaggaaaatgccctttttcgcgcgctcgttgacggggagctccgtgatgtcctcgccgttaaaaatgatcgaaccgccggttacgctgtaggccggattgccggtgatggcatagcccagcgtcgacttgccggtgccgttggggcccatcagcacatgggtctcatcctgtcccacggtcagatccacaccgtggagaatttccttttcctcgacctgcacgtgcaggttttgaatttctaaaagtgccttactcatattgaaccaccttatcttctttccgtgccgctcaaaacggccggtgttttttcattgactcgcatgaattgcgccagcgtatgattgtcgacatagctgttgatctggtcttccagcccctgccagaaaaggcgcgcgtcgcagtcgcaggaagcgccgcagccggagccgtcctcagcctgacacgcaatcggcgacaggttgccctccaccgcccgcagaatttcacctacggggtaatcctcgggggagcgggtcagacggtagccgcccgatttgcccacggcgctctcgaccagattcgcacggctcagcgcggccatgatgctctccagatattttttggagagctgctggcgctgtgcaacgtcgctcaaacgatgccactcgccgcctccgtgctcggccatatccagcatgacccgcaaagcgtagcgcccttttgttgagatcatcatgcggcatgcctccttgctcataattgcctaccttgcagataggaattttaacgcttaattcctactgtgtcaataggcatttacaaataatttggtttatgatgataaaaagcactgtgcagctgtgacaaatgtctgccgcgcagcgcttggacgaggtcttcgacctgccggagggctcggaggtgtatgtgctgaatgactttaagtcctctgcctatgacgcggtgcgcctttttgaaacgttgggcctcaaccagttccgctatatcccgttttaccccggtgcgaaggatgacggcgtcgcgcgcccgcttatcatgtttggcgaatacgacgatcaatgtcactatttgccgcggtgcattgaaaaggagaatttctacaatgaaagttgaaatgatttatctatcccaggaggacgtgatccgctgcggcggcatctcgatggacaaggccatcgacgatctggaagaggtcttccgcctttatgacaagggtgactatattctgcccggcaagatcgtgatgaagcgccctgagcccaacgctgaagagacgacgggacgcatcaacgccatgcccggctacatcggtggacggttcaacatgcccggcatcaagtggatcggcagcggtccgcagaatccgttcaagtacggcctgccgcgcggctcggccgtgatcgtgctgaacgatcccgagaccaaggtacccattgccatcatggacggcacactcatcagtgcgatccgcaccggcgcagtaacgggcttttgcgccaagtatatggcgccctcgcgctcgaagaccgtcggccttttcggcgcgggcccgcagtgcaagacgcagctgatggcgctcaaggcatcgttgccgcagctggaaaaggcgtatgtctatgacctttcccgagagagagcggaaaaatttgcggcggagatgtcgcaaaagctgagcatggacgtgcaggcggcgagcgaccgcctcgccacgatcaaaagcggcgacatccttgtgaccgcggcgaccgcgaccgagccgatcatccacggcgcggagatcaaaaagggtgtttacgttgctcaccttggcgacaacgaggtcgacgaggagctgatcctgcgcgcggacaaggtcgtcatcgacgattgggagaccgacaagcaccgcatgggcgacacgatggcctacatgttccgcgacggcaagatcgacgattcccacatcgacgcgagcgtctccgacctggtggcggggcggaagtccggccgcgacaacgacgaccagctcacctacacctgcaacgtcggcctcggcctttacgacgtggcgatcgccgcgcgcgtctaccagtatgccaaggaaaacggcatcggtcagaagctcaagctctgggacgagcctatcatggtgtgatcgatccaaacttgataggtacgacctctctttaccaaccttttggacaggtccgctttttagcgggcctgtccacattttttcgcggcagagcagcaggggagatgcacctgcaagggaattttgcctttacagaggacgattccgtgaatataatggatgcagataaaatttggcggcgctgcgaaaaagcggcgctgcggtgaaatcgacaggaaacggagatgtaattatgccctgcaccactgtactggccggtaagctggcgacgaacgaccgctcgacgatgatcgcgcgcacggacgacggccattttgatgaaaagcgattgatcgcggtcgagcccgaccagcagccgaagatttataaaagtgtagagtcccatgtggagatcaaacttccggagaaccccatgcgctacacgtcctgcccgagtgtggacccgaagcacggcatttgggccgcgaccggcatcaacgccgcgaacgtcggcatgacggcgacggaaaccacgacctcgaacccgcgcgtgctcgcggccgacccgatggtcgagctgcgcgaggcgaaggatggggaagaggagcgctgcggcggcatcggcgaggaggacatcgttgtcctcgtcctgccctacatccgctccgcgcgcgagggcgtgctgcgcctcggtgcgcttctggagcaatacggcacatatgagtcgaacggcatcgccttcaacgacgaaaacgaggtctggtggctcgagaccatcggcgggcatcactggatcgcgaagaaaattcccgaggatcgcgtcatcatcaacccgaaccagtttggtatggactcgttcgatttagaggacgctttcggtgcgcaggaatcgcacctttgctcggcggacctcagagaattcatctcggaaaaccatctggatctgaatcaggatggcaagttcaacccgcgggacgttttcggttcgcatcgagacatggatcgcatctacaacacgccgcgcgcgtggttcatggcccgctgccttgcgccgcacacctaccgctgggacggcgaaaacgcggacttcacgcccgaaagcgatgacattccgtggtcctacgttcccgagcgcaaggttgccgcggaggatatccaatacctgctctcgtcccactatcagggtacaccctacgatccctatgcgggccatgcggaaaaaggcggcatttaccgtcctatcggcatcaaccgcacgggcgtgacgacgatctgtcaaattagaagtgatgtccccgatgccattaagggtatcgagtgggtgtgcttcggctccacgacattttccgcgtggctgctggtgtacacaaatgtcccgcagatgccggactatttgagcaatgtgacgctcgacgccgagaccgacaatctctactgggtcagccgctttgtcggcgcgctggccgacaagtgctacggctcgtgcatccagaatgtctggggctatcaggacacggtgaatatccgcggcagacagatcgtcctcaaatacgacaggctgatgcgcgagagcggcgacttcacgctcgccgcgcaggcgaacgacgagctctgcgcgatggcgaaagaggagagcacgcagattctcaacaaggtcctgcgcactgccagcgagcaaatgaaaaacggcttcagctttgccgatacctgcgtcaacaagtgaataaaaagcggctctctcccaagcgggagagagccgcttttttactgtctgagggaagagagaaaagaagttcgatcaataaaaatcctgtttgcagtcgatgaaaataccgctgcggcctgaaaacacactgtaatttcatcaaaaaatcgcggtacgacagtgcatttttgttcatcctcgaccaaaataaagagaatgtgaaaaaaacgttgcgatggcgcgaaaaagatggtactctgaggcagaaaattgaacgaggatagaggcgcggcgcgcaagagtaccttcggagcgaacaggatgttccggagcgaaagggcaagccgccgaagggtcgctttttcctggcctgcaggagggcgatgacctgggtcgtcggagaagatccgccggactgccacaatgtggagcgctatcgaatcataaagcggagtgtttattccgctccctgtttccgctatgatctccacgggatcatagcttttttgttatcctttttcaatttgacccagccaaaacgagaaaggacgacaatcatggaagaaaaaagaatcgttaagccctggcaggcagggctgatgctgctcgtcggcatcgccgttatcatcgtggggcttcttgtgatgaagctcaacaaccgcatcgtgctggcgctcgacggcgtcatcatgtgtctgatggcgtggtgcttcggcatcccgtacgccgagctccagcagggcatcaaggagacggtctcgtcgatgatcgtggccattttgatcctgctggccgtcggcgtgctcgtcggcacgtggatggcgagcggcacggtgccggtcatgatctactacggcatgaaggtgctgacaccgggcttattcctgccagtcgtctgcatcctctgcacgctgatgtcgaccatggcgggcacgtcgtggggcacgctcgcgacggtcggcgtcgcctgcatgggcgttgcacagggtctcggtgtgccgctgcccgcggccgcgggcgcggtctgcaccggcgcgttcttcggcgacaaggtctcgccgctgtctgactcgcccgtcatcaccgccacggtgtgcgaggtgccgctgatggacggcattcgccacgcgctcatttccacggggcctgcgtatctcatttcgctcgttttctactttgtttacggcctgcgctattccggcggcagcgtcggcggggaagtgtatgaggatatcctttccaccgtttccgccgagttctggctcagccccgtgctgcttctgcccgtgctggtcgtggtcgtgctgattttgatgaaaaagccgacgatcccaacttttatcgccggcatcgctgcgggcgcggtgatggcgatgctctgtcagggcatcaacctgcacgacattctgacggtcatgtattccggcttttctgccgataccggctcggacgtcgtgaattcgatgctcaaccgcggcggctttacctcgatgctctcgaccatcggtcttctgatcgcggcgggcattttcggtgcaccgctccgcacagcgggtgttgtggatgtgctgctcgcctttgtggagcgtatcgcgaagacctctcgttcgatgtcgctcggtgtgctgatcctgcatgcggtgttcttcaccatcacgggtgcttattatgtgtcctatcctgtcgtcggcggcatggtgaaggatttgtatccggaatatcatctcgaccgcaagaatctgatgcgcacgatgctcgacaccggcacgggccttgcccccatggtgtcgtggtcgaccacgggttcttacaccgccacgacgcttggcgtttccaatctggcattcgcgccgtttgcgccgatgctgtggctgtcgatcgtgttttctgccatttacgccgtgaccggcatcggcacggccaaggcgaaggaggactaaggtatggaacggattttacagcgctggtacgatatgatctccatccgctcggtcaacggacacgaggcacagatggcggattacgtggcgaatgtcctgcgtgagctcggcatggacccgcactacagctattttgaagaggacaccgcgcgcgagcgcccgtcggtctggtcggtgctcgacagcgggcggcccggcaagaccgtgctgctcatcggacacatcgacacggtcggggtatctgaccgctggaagaccgatccgtttactcccacggagatcgacggcaaggtctacggccgcggcgcgatggacatgaagggcggccttgccgcgattctggagacgctgacctactacgccgcccatctcgacgaaatcaacggtaagattttagcctgctttgtcgccgacgaggagggcctgagcaagggtacctatcagcttgtggcggaggacgtcatccacgccgactacgccatcatgggcgagtgccgctacgacaatgtggctgtcggcttccgcggccgctacagctttgaggtgaccgtccacggacagaccgcgcacgccagccactatcccgaggtcggcgaaaacgctctcatctccggcggacgtctggccgcggccatcgaggcactgccgacgcttcagcacccgcacctcaagcacggcacgtggtgcgtgcgctatatggagggcggcaatcccggcacgcttgttgtgcccgagaagtgctacctctttgtcgaccgctacgttgtccccggcgaaacggacgagacctgcatcgcgcagatcatggaggcggcggagcagctcggccttgcaggcaaggtcgatgtgcgcctcaagccgagaaaatcgccctacatgcagtcgttcgcggtggaggaggatcatccgctcgtcaaaattttgcaggaggagttttactccgtcacgggcaaggatcttccgtgcgcgtatgacgcctcggtctgcgattcgaatattttagccgtttcgctcggcattccggtcgtgacgttcggcccctcgggcggcaacatgcacggtgacaacgagtacggctatgcatggcaggtgaaaaactgcggcgaggtctaccgccgcaccgtcgcgcgccttctgggcggcgaagtataaagagagaaaaaagaggcagcctcggctgtctcttttccttttgcatttcacgcagattttacatttctttgctggtttttgacaaatccctctgctatactgtattcgatgaaatttggagagaagagaggagaagtgatacaacatggatacttacaatatgatcgattttaacgaaaagaagggcttcatctgcgatatggacggcgtcatctaccatggcaaccgcgtgctgccgggcgtggccgagttcatccaatggctgcataatgaaaacaaggaatatctgtttctgacgaacaacagcggctacacgccgcgcgagctgagccagaagcttgcgcgcatgggcctcgacgtgacggaggagcacttttatacgagcgcgctcgcgaccgcggcgttcctgcgcgatcaggcgcccggctgctcggtctttgccatcggcgaggcaggccttttgaacgcgctctacgacgcaggcatcacgatgaacgatgtgaaccccgactatgtcgtcgtgggcgagggacgctcctattcgctcgacacgctgacgaaggcgacgaacctcgtctggaagggcgcaaagctcatcggcgcgaattccgacgtttccggccccatcgaaaacggcatcgtgcctgcctgccgcgcgctcgtcgcgcccattgagatggcgaccggcacgcaggcgtacttctgcggcaagccgaacccgctgatgatgcgcacgggcctcaagatgctgcactgccactcggctgaggccgtcatggtcggtgaccgcatggacaccgatgtgatctccggcatggagagcggtatgtcgacggtgctggtgctctcgggcgtttcgacgcgcgagaccatcaagacctacgcctatcgcccgagcatggtcctaaacggcgtgggcgacatcgtgagcttcgcccgcggggaaaagacggaagattgaaaattgaaaagggaagcggcgctgcgtgagcagcgccgctttgttgtattatggggacgcttagttttcctctcttgcacgcaggcctgcgacggacgagatcggcagcgagaagcagatcgcgcccgctttggtgccgggaccggcctgctcgttgatcgagcgcatgatggcggccttttcgtccttgtgggcgatgatgtagatcatatccttttcgtcagcaaggctgacgctgaagaatttttctccgcgcgtgccgcccgtgcccttggcgtgcagcaccgtaccgccgcccgcgcccgcggcgcgcgccgcgtccatgacaaagtcggaatagccttcgttcaggataacggtgatgagttcatgttcaaagttcatgttcggcgctcctcctgctttgagatcgtcggtgagataggacagtgtcttgccgccggccacgctcttgagaggcacggtcagcatgacgccgttgcccggaatgtcgataaagagcttgcgcttggcggaacggataagcgaatccgcctcctgcgcgctgccgacggcggcgataacgcacttttccgtcgcgtccagcccatagatggcgaggtgttcgctcgtggctgtgccgcgcgcgggcatgctcaagatgaggtgcagccccgccgcgtggtagagcgagcccatcgcttctccgcggtcgtgatccgtgatggcaatgatgtaatagagttccatatcagcaggcctcccacagttcgatgatctcgttgtcgccaaagtcggggagctggggctcctgcgaagcatgacgggatttgacgacatagatggctcccatcacctgcacagtgatgagcggcatcatcgcaacgagcgcgacaaggccgaacgcgtccgtcatcacattgccgccgagcgcttcgcacgcgcctgtggcgaacggcagcatgaatgtcgccgtcaaaggacctgacgcgacgccgccggagtcgaacgcgatggccgtgaacgtgcgcggcacgaaaaagctcagagccagcgcgataagatagccgggcacgaggaaatacatgatcgaaatgcctgtgatgacacgcagcattgcaagcccgcccgcggcggagaccgcgatggataagctcatgcccatcgccttggcggagatcgcgcccgcgctcagctcctcgacctgtttgttgagcgtatggacggcgggctcggcgttgatgatgaaccagcccatgagcattgcaaggggggcaaggagatagaccttccacccatcagccagcgcggcaccgagcgcgtagcccagcggcgaaaagccgacgttcacgcccgtgaggaacagcacgagacctaagtatgtatagaggataccaatcacaatgcgcatgaaaggcagcttgcggagcttgagcgaaatgacctgaaaaatcaggaagaagacaacgatcggcagcagcgccattgtcacttcccataaatactccggcagggcatgcagatagtccttgccgagctctaccgtggtggcgacgccggagacggcgccgctttcaccctgcgcgggctgcgttttgtagatcgcaccgagcagcagcaccgataagatcggcccgatcgagcacagaccgacgaggccgaagctgtccgccttggcattttcgtcgcttcgaatggacgcaacgccgacgccgagtgccatgatgaacggtacggtcatcggccccgttgtcacgccgccggagtcgaacgcgacggagaggatgctctcatccgacaaaaacgccgcggcaaagacgatggcgtaaaatacgatcagcatcgtgcgcagcgagatcgaaaagagaatgcgcaccatgcacagcatcaggaagaagccgacgccgaccgaaacggtcaagatcaacaccgttgtgtcgatctccggcacgttgcccgcgagcacctgcaaatcgggctccgccactgtgatggcgacgccgagggcgaagctcacggtcaggatgagcggcagcttgcgcgatttcgtcagcttggagcccatgtagttgccgatgcggctcatcgacatgtccgcgcccagcgtgaagagccccataccgaggatcagcatggccgtcgcgatcacgaacgagagcatcagtcccgcgtccaccggcacgagcacaaagctgatcgccataacgatcaggctgatgggcaggacggaggcggtggcttctttcagcttttccattaagatctgtttctgatacaaaacctcactcctttatcaattcaatacttccaaaaatatcatagcagagattcgccgcgatgaacaggaaaaaagggtaaaggatgtgttaagcttgttcacccgacgtggacgaaaacagcggaatggtcaaaccatcccgccgctttcccatttttaatgcatattatttactgtgccgcgtgcgcacatccgcgctcgagagagcggcggatgttgccgtcgagcattccgccgagatcatcgatgaacgaatccggctcgcccttcatgccgctgccgatccattcaagcgtcagccctgcgagcgctgccgtgtagaagcgcgcgagcgccatgatctggctttcgctgacgttcaggccctcagcctccttgtggacgtaagaaagcattgtcgtcaggatcgttttatgataatatcttgccagaatatcgctgtgggcggagttgtgcaggtgcaggatcatgcgcttgttctccgcggcgaaagacgtggcggtcaaaaatgccttctgccacgattcatagccctccacgcgctcggagagcttttcaatctccgactcgaacacgtcctcggccagcgcgtagatgtcagtgtagtaataataaaaagtgttccgcgtgacctcgcttctctccgcgatgtcgcggacagaaatcttgtcgaagggacgctctgccagaagctcgatgaagctgcggcggatggcgtttttggtgcgcagagccatgggtgggttcctccctttctcgattcgcttaaattcattatatccgatatgggaaaaacttgcaagtgacaaaaacgttgaacatttaacggaatccttatatcggcttggcggcttccaggcggaaacttggtcagcgcggcgggagtgtgaaaactttgtgcgccttgcggactttgccacttttcccgctttcatattcccgctatcatcagactgtcaaaaactgagacagcgctctttccccatgcgaacgagcagaaaggaagcgaaagcgatgaaaacctatttcacctctgagtccgtcacgtgcggacatcccgataaagtctgcgaccagatcgccgacgcggtactcgatgacatccttgccaacgatcccgacgcacacgtcgcctgcgaggtgacggcctgcaccggcgaagttcacctgatgggcgagatcacctcatcctatgtgccggactatgaagccattgcgcgcaaggtcatcgccgagatcggctataccttgcccgttgtcggctttgacgccgaaaacgtgcgcatccgcgtcagcatccacacccagtcgccggacatcgcgcgcggggttgaccgcggcgcgccggaagaagccggcgcgggcgatcagggtatgatgttcggctacgcctgccgcgagaccgacgcgctgatgccgctgcccatcacgcttgcgaaccgcctgacgagaagactcgaacaggtgcggcgcgaaaagctgctgccgtatcttctgccggacggcaaggcgcaggtcagcgtcgaatacgaggacggcaagcccaaacgcatttccgccgtcgtcgtctccgcgcagcacagcgcggaggtcggcatcgacgcgctgcgcgatgcgatcttagaacaggtcattttccctgtgctgccgccggaactgctcgacgagcacacagagtatttcatcaacccgacgggacgatttgtcgttggcgggcccgcgggcgacagcggccttaccggccgcaagatcatcgccgacacctatggcggcatggcgcgtcacggcggcggggcgttctcgggcaaggacccgagcaaggtcgaccgcacgggcgcttacatggcgcgctatctcgccaagaacattgtggccgcggagctggccgaccgctgcgagatcgagcttgcctatgccatcggcctcgccgaccccgtgagcgtgatggtcgacacgtttggcacggggcgcgtgagcgacgaaaagatcgcgagctggcttatggagcatatcgacatgcgcccaggcagcatcacgtcgcgctttgaactgcgccgcccgatctaccgccgcgtctcctgcggcggacacttcggcgaaaatgccgtgggccttccgtgggagtggaccgacatcgccgaggtgctgcaaaaggaaattttatcataacatcatctgcgaaagcggggaggaacggcattgaaaagcaaacggagcaaaacctatctcgtcagcggccttacgctggcgctgatctttgttgccatcatccttgttttccgcgacgtgctgcctgatatcgtcaaggacctgagtactgtgccattctggggtgtgctgctcctgctcacactcggctttgcctacgaggcgatggaatccgtgctgtgcctcgtcatcatccaccacaaaaagccggactgcacgtttattgacgcgctgcgcgtgacattcctcggcgtgttcggcaatatcgcgacgctgggtgcgggcacgctgccgatgcaaagcttttacctttacaggcgaggcctggacgcgggcagcggccttggcatcatggcgagcgaatacgtgctgcacaagatatccgtgctgatctacgcgacggtcgcactgctgctcggcggcgactggctggagcagagcgccagcggccttgcccgctatcttctgatcggctatgtcatcggcgcgctcatcgtgatcgcgctcacgctgctctacacatgggacaaggtgctgcatttggtgctgatactgctcggcgggctcccgcacacgccgaagtgggacgaacgccgcgaaaagtgggcgaatagtctcaccgagctcaaccgcgaggccaaaaaggtcctgctcgtgccatcgatccgcgtcaaaggtatcgccgtgagccttgtgaagctcttcgtgctctattccatcccctatgccgcgctgcggctcgtgggctgcacggcgctcacattcacacaggcgcagctgctcgcctcgctgatgctgctcatcacaagcgcgctgccgaacgtcgcgggcttgggcccgatggagtttgcgtttttgctgctcttcgccccgtgggcggacacggcaatcgcctcgtcagcgctggtactttatcgcgtggcgacgtatttcttcccgttccttctgagcgtgagcgtgtttctccgcgaggagaagaagtctttgaaaggctttgatgcgcaaagcgcttgaaaattatgacggcctgaggccgtcgggggattcccgcaccgtgcgggagtgcgctaaagggggatactctctttctcgaaagagagtatcccccttaaccccccgagagaaaggacgaggggccttccccctcgaccccacacattggcagtttcaatcttgaagaactgcacgcgctgcgcaatgtaggtgcggtgtacatggcttcgccatgaatccctgcaattcgtgaccgatttgcaaccgcgccttactatcgtgaggcgcgagtgacgttagattggcggcagactgcctgcggaatgcggcattgcttcgctcgccgcattgatgagtgctccggtagacggaaattaggctgtaccagcgcgagatgggcagagcggcagcggatgataggagtacgccaagtcgtatagcaggggtaaatgcggctttgccgcacgcaagaggtgcaatcggcaagcattgcagctcttcgagctgctcgcttgcaatgaaaaattttctctgggagggtgtaagggaggggtgtctcttttcaaaaaagagacacccctcccttatctgcgttcccacacggtgtggggaacaaggcggcagcactttgtgctgcattatccccgcgccttagcggcgcgctttaatttatagagctcttcggcagcaagccgtgtcttagcgaccacatccccgccgtcttgcgggaagcagtaatacagcgctttgtggtcgccgatgcacagcatatcgccgatctcgtaccagaaatagtcggcgtacaggctgtacgaggcctcaggcttttggaaatagtccagtttcccgccgcagccggtcaggtggaagccgttttcgtcgtggcgcagccggccttcgcccacgcggcagatctcgcgcatgttgaccatcatgcagatctgcacggggatgtcgagctgataggcaccgctttgcagctcctcgcgcacgcactgccgctcccaggcgtaccagtccggcacgtgggtgaatgcggcctcgccgttcaaacattccagcgtaccaatctctgtcaagcggtattccttgctgcagtttcggcagatgagcgacgtgcccttgccctccatcttgccctcggcgaggcagtgcgggcacttgtagagcacgcggttgagtccgtcggcgcggaacggctcgctgacggagacgccgttttcctcctgccagcggaaattgtcgaagcggaaggcggaaaagatgcgctcattgatcccggcgacgttcagctccgcaacatcgtcggacgagagcagacattgcatctgcgccgagaccttcgcgcgccgcttttgcagcccgttgtagagcgggtcgcgcgcgaacgcgccgtaggtgcggatcatcacgaccggcacattcagcgccttgacgcacttgccgatgctctccggcagcggtgtggccgtgccgtcaaagctgtagcttgcctcaggatagagcagcaccgacgttttgagcgtccgcacgcagtagagcatgtcgcgcacgagcgccgcgtccgaacagaacttgcgcgtggggatgcagccgacgctgcgcatcagccactccttgccgacaaagccgtccgacgtgcagacgatgttgaacgggcgcgggtacagcaccgcctccgcgattttgagatcgagaaagcacgagtggttcatcaggacaaggcagggctcatcgcttttgatctgcgccatgccgatcttctcgcagtggaaatgcgtcgccagaaggtcgggcgcggaggctgcgcgcaggaccgtccggaacagcagcgacggctttttcggctttttgtgcacctgcggcggctgggcgagcgcctgttcatatgtcatatcgacgactttaattttcattctgtttctccggcacgacgtggatgttcagatgatcgtaggacatctccacgttgtgctttgcaaaggtattgcgcaggcgctcgtacatcttaaaataagtgtcccagtaggcgtctgccgccgtccagcagcggatggtgtattcgatggagctggcaccgtaattcgagagatacaccgtcggcgtgggttctttcagcacggcggggaaggcgagaacggcgtccatgcaggcctgcttcacctcgtccgtcggcgcgtcataggatgctgtgaccttgtagacgatgcggcggcggcccaggacggtgaagttgatgatcttcgagctggacatttcgcggttgggctggagcacaatctgtccgtccggcgtttcgatcttcgtgtgcgtcagtgaaatttcacgcaccgtgccggtcgtgccgccgacttcgatctcgtcgccgagtgagaacggatgcgagaagagaatgacgagtccgccggcgacgttgccgagaatgtcctcggcggccagcgtgacgcccaacgtcagcaccgacatgatggcggtgagcgacgaggtgttgatgccgagcgcctcggctgtgatgatgatggtaagcagatacagaagcgttttgaggctcgtgaggatgaccttttgcagccgctcgttcaggcggttcgcgcgcgagagcagccgcgaacagagcttgagcacgagccgcacgacgatcaggcagatgaggaacgtcagcagcgcggaaaggatgctgccgatgctgtagccaccgatcgagcgggagatgatctgggaaatattgtccatggcgtttcgcccctttcgatgcccagtatatcagtgttgccgcgcctttgtaaagagcacgctaagaatcctcagaattccttaaactttgccggttgagaaacgggcgggaagagcgtataatgcagcgtgatcttttttgaaaaggaagtgcccgcatgcgcccttacgccctcatcgacctccactgcgacacgttgaccgactgcatgtacgcaggattgaacatcatcgacacactcgacgatcccgcgcgcacgctgtcgctcacaagtattccgaaggacatccactgggcgcagtttttcgccgtgttcgtgcccgatgagctgcgcggggagaaggccatccgcttttttgatgacgcctgcgcgaatttcgaccgccagatgcgaaaattcgcagatcgtgtgtcgccctgccgcaatgttgccgatatggagcgcgcgtgggcggcggggaagaccgcggcctttttgagcgtggaaaacggcagtgcgtttgcgggcgatttgtcgcgcatcggggagctgaagcgtcagggcgtctgcgctgtgacgctgacgtggaatggggaaaacgagctcggctcgggtaatgtgacggaccgcggcctgacggactttggccgcgccgccgtgcgcgagatggagcgctgcggtattttggtcgacgtctcgcacctgaacgacgcggggctcgcggacgtgttcgagacggcggaaaggccgtttctcgccacgcactccaacgcacgcgcggtctgcgcgcacaggcgcaacctgacggacacgcagatcaaagagatggtgcgccgcggctgcctgatcggcctcaactactacgggccattcctgcgcgacgggggagcggtcaggagcttagacgacgtctatcgccatgtggcgcactttttcgacctcggtgcgcgcaggaatcttgccctcggctcggacttcgacggcgcggcgctgccgccgtgcctcgattcggcggaaaagacggcggatttttacgagtatctgctttcgcgcgacgtatcgcaggcggacgcggacggtattttctttgaaaatgcacgcgcttttctgcggaaaaacctcggatgagcgcaaaacgcttggcagcgggcagcgcactgtgatacaatcaatagaaacaggggaggggagcacacatggcaagaaaatcgagccgcaacaccaaggcgcgcatcgtctcggcggcgtggaagctcttttacgagcagggctatgaggagacgacggtggaggagatcatcttcgagtcggagacgtcgaagggctcgttctaccactattttgacggcaaggacgcgctgctctcgtccctctcggtgctgtttgacgagcggtatgaggagctgatgcagcagccccacgacgagatggactgcatcgagctcttatgctggctcaatcaggagttgttcacgacgatcgaaaacacggtctccatcgagcttttggcgcggcttttttcctcccagctcgtgaccaagggagaaaagcacctgctcgaccgcaagcgcacgtattaccggctcctgcgccagatcgtctcgcaggggcaggagtgcggggagctgaccgacacgcgcaccgtgagcgagatcgtcaaggcctacgcgatgttcgaacgcgggctgatgtacgactggtgtttatccggcggggaatactcgctcgtccagtatgcgcggcagatgatgccgctgtttttagatggctttcgaaaaaaataaaattcgtttcaaaaacagtctactaaatcgtcttacagaaaatacagtaaaatcaatcgaaaattcgaaatttcacagtgccgtacagaaattattctgtacggcgttctgtatttacgtctgctttcttttgtgctatattgtgctcgtcttaacgaaaactgaaggagaaaatcacatgacaagcgcacagatcattattgtagtgaccatcgttctctatctcgccgcgatggtgttcgtcggcgtgtattttggcaaaaagggcagcggcagcagctcggacgatttctatctcggcggccgcaagatgggccccatcgtcacggccatgagcgctgaggcgagcgatatgagcagctatcttttgatgggtctgcctggccttgcctacctctgcggactgccggaggtgacgtggacggccatcggtctggccatcggcacgtatctcaactggctgattgtcgcgcgccgcctgcgccggtattcggccaaactcggcgccatcacgatccccgactttttcgcccgccgcttcggagataagaagcatctgctctcctgcatcgcggcggtcgtgatcctcattttcttcattccctacacggcgtccggcttcaaggccatcggcacgctcttcaatagcctttttggtgtggagtaccacacggcgatgatcgtcggcggcattgtggtcgtgctgtacacggtgatgggcggcttcatggccgtttcgttcaccgacctgatccagtctatcttcatgaccattgcgctcatcgtcatcgtatgcttcggcgtgcagcaggcgggcggactggacacggtcatcgacaatgcccgtgcgctgccgggctaccttaacatgacgcagggctacgatgctgcgaccggcacggcctcgacgtacagcgctctgagcatcgtctccacgctcgcgtggggccttggctacttcggcatgccgcacatcctgctgcgctttatggccatccgcgaggaaaaggagctcaaccagtcccgccgcatcgcgacgatctgggttgtcatctcaatgttcatcgccgtgtgcatcggcgtcatcggctacagcgtgtccgccgcgggcaaggtgcctttcctgacgacgagcgcggagtctgagaccattatcatcaagcttgcagatctgatgagccgccacggtgtgctgctcgccgtcatggcgggcatcatcctctcgggcattctggccgcgacgatgtcgaccgcggactcgcagctcttggccgcggcgtccagcgtgtcacaggacctcatgcagcattcgttcggcatgaagatgaaccagcgtacgacgatgctggccgcgcgcgccacggtcatcggcatcgcccttatcggcatggtgcttgcgtgggaccccaacagctccgtgttccgcgtggtttcgtttgcgtgggcgggctttggcgcggcgttcggccccgtgatgctcttctcgctcttctggaagcgcgcgaacaagcagggcgcgctcgcgggcatgatcactggcggcgcggtggtcttcatctggaagtacctcatcgcgccgatgggcggcgcgtgggccatctacgagctgctccccgcgttccttgcggcgtgcattgcgatcgtgatcgtatcgctcgcgacgcccgcaccggagaaggccgtcaccgataccttcgacgagatctgcggcaaataaaagggaagaacaggcgagggctgcggccctcgcttttctttgttagccaaatggagtgaagtgcaaaaatatgacaaaaaatctgcactgcctattgaaaatggaatgactaacgtttattatagataacatctatttatggatgctgacatcaggcggcgggatacgtgcatttgtcctgctggccgatactacacggatggcaagcagtgaaaggagaaaacagcagtgtcaagactcgatattatgacgccctcccatgcccagaccgtcatcgacgggctgtaccgcgatgtggagcggcgtatcgccgcaagccctccgggactgtgcccggtggacctggccaagagctttctggacctctgccatgcgcagacgtgcggcaagtgcgttccctgccgtatcggcctcggccagctctctgagctgatggagcaggtgctcgagggcgaggccacgatggagaccatctcgatcatcgagcgcgtggcgcgcgtgatcgtcaacagcgccgactgcgccattggccgcgatgcggcgcgcctggtgctcgatggcgtgcagggcttccgcgacgactatgaagagcacatcctgcgccaccgctgccttggcggcatgcgcgagcccgttccctgcgtggcactgtgccccgcgggcgtggatatcccgggctacctcgtgctcatcaagtacggccgctacgccgacgccgtgcgcctgatccgcaaggataacccgttcccctcggcctgcgcgtatatctgcgagcatccgtgcgaggcgcgctgccgcagaaatatgatcgatgacgcggtcaacatccgcggcctcaagcgctacgcggtggataatgcgggctacgtgccgcagcccgactgtgccgagcccacgggcaagaaggtcgccgtcatcggcggcggcccaagcggcctttccgcagcgtattacttagctttgatgggccacaaggtcaccgtgtatgaaaagcgcgcgaggctcggcggcatgctgcgctacggcatccccaactaccgcctgccgcgcgaagtgctcgacgcggagatcgcgtcgatgctggcgctcggaatcgacgtgcatgtcaacgtcaatgtcggcgacgatgtgacgttcgacgagctgcgccagcagaacgacgcgctttacatcgcgctcggcgcgcacacggataaaaagaccggcatcgagggcgaggacgccgagggcgtcatctccgcggtcgagatgctgcgcgagatcggcgacgatcacatgccggacttccgcaacaaggacatcgtcgtcatcggcggcggcaacgtcgcgatggatgtctgccgcagcgcggttcgtctcggcgcgcgcaaagtgagctgcgtctaccgccgccgccaggaggacatgacggcccttcccgaggaagtggagggcgccgttgccgagggcgtggagctcgtgacgcttcaggcacctgttcgcatcgagaccgatgcgaatggtcacgccgtcgcgctgtggacacagccgcagatcatcggcgagatggataaaaagggccgccccgcgcccgaaaaggccaagcgcagcgaaaagcgcatcgcggcggacgttgtcgttgtcgccatcggtcagggcgtggagacccacggctttgagcagacgaagatcgccatcaagcgcggcgcgttcgtcgccgaggccagcggccagatcgacaatatggacggcgtcttcgccggcggcgactgcgtcaccggccctgcgaccgtcatccgcgccatcgcggccggcaaggtcgccgcggcgaatatcgacgaatacctcggcttccaccacgagatcgaccctggcgtcgagatccccacggcgcggctgaacaacaagccgccccacggccgtatcgacaccaccgagcgcgaggcgggcgagcgcaagcacgacttcaagtgcatcgagtgtggcctcaccgatgaagaggcgtactctgaggcgtcgcgttgcctgcgctgcgaccacttcggctacggcatcttccgcggagggaggaaaggcaaatggtaagaaacgttacactgaccatcgaccacaagagcgtcaccgtgcccgagaataccacgatcttggaggccgcgcgctcggtcaatatcaatatcccgacgctgtgctacttaaaggacatcaacgagatcggcgcatgccgcatctgctgcgtggaggtcgagggcatggagcgccttgtccccgcgtgcgacaatgtggtggcggacggcatggtcgtcttcacgaacagcgccaaggcgcgcgaggcgcgccgcatgaacctgcgcctcatcctctcacaccacgatacatcatgcacgaactgcacgcgaagcggcaactgcaccttgcagcagctcgcgaacgacttcaacatgcgcggcacgcacttccccaaaaagctgcgtcacgaggcggtggactattccacaccgctcattcgcgaaaacgacaagtgcgtgcaatgcctgcgctgcatccaggtgtgcgaaaacgtgcagagcgtgaagatctgggaccttctcggcacgggctcgcgcacggtcgtggacgcgtcgtacaaccgccgcattcaggataccgagtgcacgtactgcggccagtgcatcacccactgcccgacggcggcgctgcgcgagcgcgacgacacgggccttgtcttcgacgcgatcgacgatccgaacgtcgtcaccgtggcgcaggtcgcgcccgcggtgcgcgcggcatgggccgagcagttcgggctcgacagcgagttcgcaacgcccaagcgcatggtcgcggcgctgcgcgagctgggcttcaactatgtgttcgacaccgactttgccgccgaccttacgatcatggaggaaggcagcgagtttatcgagcgcttcacccacaaggatcagtatcagtggccgatgttcacgtcctgctgcccgggctgggttcgctttgtgaagtcccagtaccctgaactgacggacaatctctccacggccaagtcgccccagcagatgttcggcgcggtggcgaagagcttctttgccaaaaaggtcggtatcgaccccaagcgccttttcgtcgtctcgatcatgccgtgcgtgtcgaaaaagagcgaatgcgcgctgccgacgatgaaaaacgacgcgggcgacccggaggtcgacgtgagcatcacgacgcgcgagctgaacattatgatgcgcgcgaatcacattgaacccaagtacctgcccgaggaggagttcgacagcccgctcggctccgcgaccggcgcggcggtcgtcttcggcgcgaccggcggcgtgatggacgcggcgctgcgttcggcgtacttcctcatcacgggcaagaatcctgaccctgacgctttcaccgccgtgcgcggcatggacgggtggaaggaggcgacgttcaacatccccggcgcgggcgacgtgcgcgtcgcggtcgtgagctcgctcgggaaagcccgcaagctcattgaggctgtcaagcgcggcgacgcagcgtatgactttgtcgaggtcatggcctgtcccggcggctgcgcgggcggcggcggccagcccatccacgacggtaccgagcttgccgaggatcgcggcaacgtgctctggcggctcgatcagggtgagcttctgcgcttctcgcacgagaatccggatgtcaaggcgctctacaaggactacctcggcgcgccgcttggcgaaaagtcgcaccacctgctgcacaccgaccataacgcgtggcagatgccgcagaaaatgctgtaaggacgcaaaaaaactccgtatgaggatttctcatacggagtttttttattgctgaattttatcgggtgtacgtgccgtactcactgatgacggcgcagagctgactgaacgcctgctgcgcgttgccgttgatcttgtaggcgacggcggggtgggcgtcatcgtagatgaagccctcgtcccagttgagatataggtcgtgcttctgtccgtcttcggggatccaccagatggtgacatagttctcgttctgggtgaagcgggagagcagcgatgtgggcaaacgataatagcgctgcaccgaaatttcggacatggcgctgcgcagagctgcggcggcctcgctgtccggatagccctctacccggcagtcgccggtgtcgaacgtgccgtagccgtccggcgtgggaacaatggtcgaaatgcagaagagtccgtcgacgcgggcggtctcaggcgcggggatcagctcgccgagcggctgcgaacggcgcggcagcaaaaagatagccacgacgagcagcatcgcggcgacggcgatgagcacggttttcctctttttatccatggggttctcctttccaacatcaagcttgctttttgccgttcaacaggggagagggaaatcgcttttcgatagtttacctgatcaagagctttttgacaagcccttcttcgggcgtgacatagagcgtgcggtagttgtcgtaggtcaccatgccggggcgtgcgcccgcgggctttttgacgaacttcacggggcagtagtcgacggggacgctgctgctctccttcgcctgcgagaagtaggatgcgagcattgcggcctcgcgcagatcgacgtcgctcggcgtgaggcccgcgcagcgcaggatgacgtgcgagccgtgaatgcgctgggtgtggaaccagtagtcgcgcttgtcggccttttttgtcagctggtcgttctgtatgttgctgcggccgacgaggacctcgagcccgctcgacgttttgaatgtgcgcggggcgaaggcgcgcttgagctcctttttgccgccgctggattttttgaggtagttcgtctcctgcaattcgcggcggatctcattgaattcctgctcagtctccgcctgcgaaagctcctgcaaaacgctctccaagtacgcgcgttcgttttccgccttttcgatctgctcgcgcaggtggaattcggcggtcttgagcttgttgtactgcttgtagtttttcgcggcgttctgctggggggagagcagcgggtcgagcgggatgtcgatggtcgggcagccgtcctcatagtagttttccgcatgcaagactttttctccgctcttcatgcggtacaggttggcggtgatgaggtcgccgcgcaggcggaattcgtcgcgcttctgcgtcgcggcgtagtcgcgcttcagattttcagccttgcgcgccatgcggtcgcgcgcgaccgtgaccgcgtgcgtcagctcgcggccgcggcgggcggagagctcctgcagctcacgcgcgtcgtagaactcgtcgagcatttgcgagaagctctcacgcgtctcgacctgcgtttccgcgctgtactgcgcgatggaacggtaggtgaaatccacgggcttgccgtcgcggtagaggatgacgggcatatagttatcttcctttacagcgttggctgtatcggaaaattcctgcaccagcgccccgcgctgcgcatcgttcagcgcgccgaagcgcacgtcggtctcatgtcccgcgcggaaagcgaattcacgcgcgatcagcggcgaaatgccggtgtaatggtcgagcacccacttgtcgacagcctgctccgcgtcgccgccgcgctgcgcgagggcgagggagtcctcctcctgcgataaaagcgacagcttgtcgagcggcgtcggcagatggtaaaaaaggccgggcagtagttggcgcgtggcggaaaggtccgagtccacgcggcgcagacattcgacgatacgcccctgcgcgtcgagcaggacgaggttcgaccgccgccccatgcactcgagcacgagctgcttgcggctgatctcgccgaattcgtccgtgcactggagcgtcaggatcaccatgcgctcaagatccggctgctcgatggacagcacgcgcgcgccgactaagtgcttgcgcagcagcatgcagaacatcggcggctgggcggggttgtcgcgcagaatattgctgagttgaatgcgcggttggttcgcgcccgcgttgagcagcagccgcaaatttccgcgcagcagcagaacgatttggtcgcgcgcgggctgctgcaccttgtcgatgcgcgcaccgatgagctgaggtctcagctcgtgtaaaactgcccgcaggcagatcgcgtcaagtggcattgtcatcctccatcatccggttgaaaagctcgttgatgcgcgcgtgatcgtcgcgcagatacagccagccgaacagcgcctcgaggcccgtggccttctgatagtccgcgcggtcggcgtggtgggggatggaatggacattcgcgttgcgcccgcggcggaacacagaggcctcttcctccgtcaaaaggggtaagagcttttcggcaaagcgcgcctgctgcggcgcgcagacgagctcgaccgtcgcacggtgaaggcccttgcccgtcgccttgccgtgcacgcacagatatgtgcgcacaagcagctcatacaccgcgtcgcccaggtgggcgaggccgatggaactgatggcgcgaatggcgtcgtcgttcattttggcttgcgtataatcgtacataaagactcctgaagttcgaaagtacacatattctataaccttgtcggaattctgtcaatcggcgcgcgctgccgcgcgcgaaaagccgttgcgcttttgcaaaaatccgctataatggcagaaaagacaagacctttgagatcggagaaagaagcctatgaaaaaactgaccaccgcgctgctcacggcgcttttgctgctgaaccttgccgcctgcggcgaaaaggagccggacgacaccccgtccggctacgatgattcgatcatttccgagctttacagtgaggagggcgagtacacggacgccgagaacaacacgctcgcatacagctaccatgtgccaagaatcgtgtcggaaacggcggtcgccgccgcgctgaacgacgagatcgccgatcaattcggcgcgctcgtgcaggagcagaagaacatgatggcctcccgcgtttcactcacgtgcatttccgtcacgtggacaagctactggaacgacagcctgctctgcctcgtggtgcgcgcggagatggacggcgacacaagcatgacggagacgtacagctacgactttttcggcggcaaacgcctcatgagcgaggacctgctggcgcgctgcgagctttcaacgcaggacttcatcacggcggcgtgccgcaccgcggcaaactactttgatgagacgtaccgagatgcgctcagcggcagcatgggcagcgcggacttcatcgcgtcctacgccgagcgccgtgcgtggacgctctcggacgagaacatcaacgcggaaatgcggctctatctcgacggcggcgcgctgcacatgatcgtgcccgtcggctcgttcgccggggcggagagctacgacgctgacctcgcgctcgacctctccgcgcgcgagacggtcgagaagacggcgcaggacagctttgtcaaggcagcgctctcgggcggcgatttgaccgtcagctttgaaaagacggcggactccgcgtggtacgcggaaaatttccgctttgactacgagaccgtctacccggtggagggtttgtattcggactacacggatgtgttcgtcggctcggtggggcaggggtacttcccatacatcttcctgctgacgagcgagggggcggtggagtatgtgaacctgctcgaagggctgacggcgggcttcctctgcgacggcgggccgctcggcggcgtgaaggatatcgtttcgttcgagtccggcgaggtcgaggaggactacggcacgtatcagacggtgttcgccgtcgacgcatcaggggagaaacacgacctctccggcgcagtcagcgacgcggactacacgatcccgtcggaatttctcggcgaatggacggcgaccgtgacgcacgacaccgccgagcagggcagctatgacagcgattatatcctgacgctcacggatggcggcggcctcacggtgcaggacatcaacagcgaggtcgggctttactttgagtacaccggccagctcaactaccttggcacgaacggcgagggcatggtcttcggctaccacttgaacgagaatgcgggcacggtgcgctacggcgcgttcacgctgctgcgcggcagcgacggcctgcacgtcaaatccgtcgcaggcgaaaacttcttcgacgcgccgagcggacgctacacagtgtttgcgagagggtaaaaagaaaagcagggccttttttgagcgcggaagggccctgcttttttgcggctttgacgcgctaagcaaaattagagggggggtaccgctttgaccgcgctcccagctgagctataccctcgtataaggggtgcgctgagtaatttcttattcaattagtgcgggggttgtttaccgcttcaaccgggctcccagctgagctatacccccatgtaaggggtgcgctgagtaattccttattcaattagtgcgggggggttgtttaccgcttcaaccgggctcctgatccatgcggtcacacccccttggcatctgacgggagaaagaggctttggcggcatccggagaccaaggagaaagcctctcaaatcgggggaaatgctctagtgaaaggagaacctttcaaaaaagcaaaaatttcttcaaaaaagtgttgacaggttctactctctgtgctatattatcacttgttccgagccgaacggaacggtaaaaacaaaacggcatgggggtatagctcagctgggagagcgcttgactggcagtcaagaggtcagcggttcgatcccgcttatctccaccaagaaaagccttgaaagtgtaaactttcaaggcttttttgcttaccatcgatccgaaagaaacgcgggtggaaagaacatgaaactgatctgcatcggtgacagcctgacctttggatacggcgtgcatctgtctcagcggtggacgcggctgtgcgcacaggagacgggctgggagcttgtcaatgagggcatcaacggcgacacgaccggcggcatgctggcgcgcatgcagggcgaggtgctcgcggagctgcgcgagggcggccttggcgccgaccggccttacgtgctgctgatgggcgggagcaacgatgtgttctactccggctccgacgctgcggcgcggggaaatatgggcgcgatgatccaccagctcttttccgtgggcgtgctgccgatggttggtatcccgcttccggcggatgcaccgcatgcgccacgggcgtgggcggccgcggtcgattttgaagcggcggagcggacgatgaaagggtaccgcgcatggctcaagcggtactgcacggcgtttggcgcgccgtatatcgacttctgcgcggattttctgtcgccggacggatcgatccgctcggagctgctgctcgacggtctgcaccagacgccggagggacaccgcttgatggcgcggcggctgagcgcgcagctgaaaagacaaggataacagccctgaaaaaggcttgaaaatcaacgaccctgatagaaggagaccacgaccatgaagctatcatatctggatctgatgacgaccgatccaagctacaatctggcgatggagcagcacgtgttcgactgcctcccgcgcgaccgcatgtatttcatgctctggcagaatgacaacgcgatcattgtcggaaagtatcagaacacgatcgctgagatcaatgaagaggccgtgcgcgagcgcggcattcgcgtggtgcgcagactttccggcggcggcgcggtctatcacgacatgggcaacctgaacttcacgttcattacggatgtcggcgagagcaatgcgctggacctcaagctcttctgcgaaccggtcgtgcgcacgctggcaacgctcggcgtgaaggcggaggtcaacggccgcaacgacatcacgatcgacggaaagaagttttccggcaactcgcagtacatccgccagggacgcgtgatgcaccacggcacgatcatgctcgattcggacctctctgtcgtcagcgaggcgctgcgcgtcgacccgacaaagatccagaccaagggcatccgctcggtgcgcagccgcgtgacgaacgttgccgagcatctgccggaaaaggtcacgctgccggaattccgccgcatcctgctggaaaacatcctgaaggagaatccgggcgaggcctacccgctgacgcaggacgaccttgcggcggtggaaaagctgcgcgcggagcgttacgccacatgggattggaactacggtttctctccggcgtgcacgatgctgcgccgccgccgcgtggacggttgcggcctgatcgaggcctacatcaccgtggagcacggaaagatcgcggccctgacgttcaagggcgacttcttcagtgcctcggaaccggacgagctggcggcgcactttgttggctgcacgccgaaccgcgcgggctatgaaaaggcgctcggcgatgtggacgtttcgcgctacttcgcgggcttgcagaaggatgagctgatcgacatcctgtgcgagggataatgaaaaggggagccggcgtaaaaagtgccgactccctttttctcgctcaaatggcaggcagagcatgtcattttccacctatcagcagagccagcagctctgcaagcttcgacttcactacgacatcaccgcttgcggcgctctgcgtcaggatgccgtcgcacagcggggagaacgctgcgctccaccactggagggtattagtgccgcgcgcggcgcagaaaagcagcatgaccgcgaggccaacggcaagggaaagctcccacttcgtccatttcatcgaaaaaccgcccatctcaaagaatttgctttgagtatggacggctttttcgcttcttaaacaaattccgtgcaaaaagtttgaatgctgccgctttgcagcgcgtcacaggctgcgcggcaggaggtctcatcggaaaaaagaccgaacaccacgctgccagagccggtcatggccgacgtcttcgcgccgtaggcgagaagatcgcgcttgatggtctcaatgcgctcacgctgctcgccctcaagcgcctgctcaaagacgttgcgcacgttcgcacagagcgtgtccgcgtcgccgcgctcgatggcggcgagcatcgcgtccgtatcaggacggtcggtgatcgttacaccgtctacgcgcgcgaagagcgcgggtgtggagatcgggaagtccggcttgcagacggcgacgaagaagcgcggtgcgggcttgaggacggtcagcttttcgccgcggccctcggccagctgcgtgccgccgcggatgcagaaggggacatcactgccgacgcttgcgctgatctgctcgagccgctcgttcgtgagggtgggggagacgagctcgcgcagcgtgcgcagcaccgccgcggcatctgcgctgccgccggccatgccggcctcggacggaatgcgcttgataagcgcgatgtcgatgccgccgccgtagtccatcgcctcgcagaagacctttgccgacttgacggcgaggttgcgctcatcgcagggaagcgccgcgccgtcgacgcggcaggtgatgcctttgccgtctgtgagtgtgacggtcacatcgtcgtggagcgaaacggtctgcatgaccatctgcatctcgtggtagccgtcatcgcgcttgccaagaatgtcaagcgtcaggttgagcttagcataggcggggacagttatgctgcgcacgggctcctcgaccggtgcattcagcgccttgccgcagtgggggcagtaggcaccgccttcacctatgcgtccgagcggtctgccgcagtgcggacagcggtagtaaagaaccccaatcacgatggcaaagagcatgatcgcgataccgagaataacaagcggtacgctgacgcttgtgccgacgccgctgagcagcgcacctgtaagaagcagcggtgtttggagcttttggaccctgcgatagtccatcaggggctttttgtcgttcatcgcggcctccttgtgcgctcagtgcttctttttcttgtgctggatctttttcttcgcctcgggctccggctcgtcggcgacccacgcgccgcatttcgggcagcgcttgggattgccgcggcccagctgctcgtgacagtaggggcagcggtggtacatccaccacacgacgatggacatcgccatcatcgcaaggcccaggatcgcaatgtagaggttatcgagcacggcaatgccaaccatgccgatgacgaagccgccgaagagcaaaatgttttgccagcggtttgcggatttgagattcatgttgcgtcctcctgagcaaaaaagcgccttgcggcgcttttttgcagtagctttgatattttagcggatcttgcgtgcctcgacgtagtagcgcttatcctgtgcatgacccatggagaaggtcttgcggggcagaacgccgtctgccataacggtcttgaagagctgctccttgcccatcgcgggaagcaggaagcccatgttgccctccttggagccgagctcgcgggtgacctcatcgccgtggatgtagtcgacctcgccgccgaactgcttgaggtactcgtcgatgaaagcctgcagcgtgccgacggccagctggaccttcgggtcggggacagtgacgaaatcgtcgtggccgttccagcagacctcgatgacgtggccctcgcccttgccctcgtgggcgttggggtagaacttcttgaactcttccatgaacttctcatggtcgacgccgaagagcacgcggtggatgggctcgaactggagcgcgtcgtcgtggttgttcacgacctcgacaagtgcgtagcgggagggcagcgcgaggtattcctcgggagtcttgcccttcttctgctcttcatagcaggccttggcggtggcgagggagtggttgccgtcgccgacggcgaacagcaggggcgcgacgccggagacgccgtacttgctcttcattgcctcgtcggtcgtgaggccggtcagcgcgtcggcgaccgcgtcgatctgctcggcggagagcttgtagcccttgatgtggccgccgttttccatcaggtcgaagtcataaacgctctccatcttatcggccgcggcggtcaggggctcgatgacggtcttctcggggtcgtcaatgagcagcatgacgtggggcagctcgatgggggcgttgcggcgcacgcgggcgcgcggggggatacggtcgagcacggtgccctcagtcgcgcggatcagcgcgccggagccgggggtgaagtcgtactggtcgaggtcgaccataccaatgaggccgtgacggatcttaccgtcgctctggccgcgctcgatgtagatgagggagtccttgagcgtttcgaagatgccctcttcgaggtacttgctcatcgaggcgttgatgtcggcgatgaactcgtcgacgttgggggccttcaggttggcctcgggcaggatgaggcgcagggtggaaggcgcgtcgccgacggtcttctccacgcgctcccagtactcgggctcagaggtgaactggtcgcatgcgacgaccgcccacttgctcatatcgacatccttcttgggcagcagaatgtcggaaggataaaagccaagcttggaaaacttttcgttcatggtgattcctccgttatttgtttgataagcggaacgcggggcgctccgctggtgcgattgtaaaacaaattatacaatagcccacgcggaaaaagcaatggagaaagtgaaaaaatgtccaaaagcgctttatggaaatgccatgatagagcgcttcgcggcccgcttgcttgacgaacgccccgcggcatgatattctgacaacctatgcgaaaaaatacgaaagattcaggtgatgattttggataagcgcgcagatctgggacacggggacgtcaaaaagctgctcttttcgctctccgtgccgacgatcacctcgcagatcgtcaacatgctctacaatctggtcgaccgcgtgttcatcggccacatgcagcccgccgagaccgtcggaaaactcgcgctcacaggcgttggcgtatgcctgccgatcatcatggtcatctcggcgttcgcgtcgctcatggccatcggcggcgcgccgcgcgcctcgatcgccgagggcgcaggcgagagcgaaaaatccgagcgcatcatgggaaactgtctgacgatgcttgtgatcacggcgctggtgctgacggtgctgttcgagtcctttgccgagccgcttttactgatgttcggcgcgagtgagaacaccatcggttacgcgctcgactatatgcgaatctacgccctcggcacgatcttcgtgcagctgacacttggcatgaacgcctacatcacggcacagggcttcgccaccgtgagcatgaagacggtgctcatcggcgcgctcttaaatacggctctcgacccgctgttcatcttcgtgctcggtctcggcgtgcgcggcgcggcgctggcgacggtgatctcgcaggcagtgtcggccgtgtgggtgatgacgttcctcacgggaaagaagacgcgctggcacttaaagcgcgagaacctgcgtgtggacgcgaagatcgtgttgccgtgtatcgcgctgggactttccccgtttgtgatgcagtcgacggagagcctcatcgccatctgcttcaactcatctctcctgcgctacggcggcgacatggctgtcggcacgatgacggtgctgacgagcatcatgcagttttcgaacatgccgcttcagggcttgacgcagggcgcacagcccatcgtgagctacaatttcggcgcaaagaacgtccagcgcgtgcgcgatgcctacttctgcctgctgcgcgcgtgctttacttattcaatggccatctggcttctggtcgagctcttcccgcgcgcgttcatcctgattttcaataatgaccccgcgctggtcgaatacgcggcgtgggccgtgcgcatctacatggggtgcagcggtattttcggcatccagatcgcctgccagcagacgtttgtggcgctcggcaacgcgaagacatcgctcttcctcgccgtgtggcgcaagatcatcctgctcatcccgctcatctatattctgccgcactttttcgcggacaaggcgttcgcggtgttcctggccgagcccgtggcggacttcggcgcagtggcgctgacgagcttcacattctatcgccagttccgccgctcaatgcgcgagctggaaggtgcggaagcgactggggagcggtaaagaaaatttttaacgcaaaaataaaaggagagggaactccctctccttttattttttacgcctggccgccgctttccatcggctctttctcgcggaacagcatcgtgatacaccagatgccggcaaggcctacgagcgtgtagatcacgcggctgagcataccggtctgtccgccgaagagaaaggcgacgcagtcaaagccgaaaaggcccacgctgccccagttgagcgcgccgatgatagcgagcgtcagcgcgatcttgtcgatgaccatgaagttccctccttaaaaagatggtttggtcttcggtagtcttcccgtgatgggcgaaaatatgcgtacggcgttttctgcgttgcccgaaaaagaaaactatgataaaattaggataaaatattgataactttaagagagaaaaagggggaaggacgcttgctgcacatactgatgggacgcgcgcgcacgggcaaatccgagcgcgtgctgcaaaggatcgccgcgctgggggactcgtcgcagcaaatcctgcttgtgccggagcacgcctcgcatgtggcggagatggacctgtgccgtgtttgcggcgacaccgcgtcgcgccatgccgaggccttgacgttcaagctgctcgcctcgcgcgtgctgggcatctgcggcggcagcgcggacgtgacgctcgattcgggcggaaagctcctgacgctccagcgcacgctcacggagcttgcgccgatgctcaaggtctacaagcgcccgtcgcagcgcgcggcatttttggagagcctgctcgccgtgatggaggaattgcaggcctacgccgtatcgcccgagcagctatccgagagcgtagcgcagatcgagggtgagagcggcgacaagctgcgcgacctttctctcatctacggcatttacctcagcaagctccacgcgccggggcacgacgcgcgcgatgtgcttgaaaagctggaggaaaacctcgaagcgtcgggatatattgaaaataaagacattttcctcgacggtttttcgtattttacggggcgtgagctgtgcattctgcgtatcctgctgcggcgcgcgaagagcgtgaccgtcacgctccttggcgacacgcaggaccgcgagctcttttccgagagcctgcgcgtgcgcgagcggttgtacgcgctcgcgcgcgatgccggcgtcgcatgcgaggaggaaattcttccgcagggcgaggtgcgcggcgcgctcgaccatatcgagcgctgctttttcggcacagcggacgaatttacccagccgactgacgccgtcgagctctatgaggcgagcagcgcgtacagtgaatgcgagtgggtcgcgtcgcaggttttacagctcgtgcgcaagcagggctaccgctaccgcgagatcaccgtcacggcgcgcgatctcgactcctacgcaggtgcgatcgagagcgtattcgcccgctacggcatccctctctattatgcccaccgcagcgacattttgaaaagccccgtgctgacgctgctgctcggcgcgctggacgccgcgagcggcggctttgagtacgaggatgtgttccgctgcctcaagaccggcctcgtcggcctcagcatggcggagtgcgacattctggaaaattacgcgctcaagtgggagatccacggcgcgatgtggacgcgcgagacgccctggtcggcgcatcccgacggctacggcgaagaatggacggacgaggcaagggcgcggctcaagacggtcaacgcactgcgcgagcgcgtgcaggggccgtttgcgcgcctaaaaaaaggcgtgggcggcagcggtacggcggagcaaaaggtgcgcgcgctgtacgactacttagaagagatcagactgccggaggtcttgcagacgcagaccgagcagctttttgccgcgggcgatgcccagcgggcagaggaaacggcacagctgtggggcattctttgcggtgtgctcgaccagtttgtggaaatcctgggcgacgcgatcctcgacgccgaggaatttgcaagcctgatgcgccttgtgctgacgcagtacagcgtgggcacgatccccgtgacgctcgacgcggtgaacctgtgcgaaatgacgcgaaacgaccgccacacggtgcgcgcgctgttcctgctcggcgcgaacgacggcgtgctgcctgcggcggagaaccgcggcggcgtgctgcgcgacgaggatcgcgaggcgctcgagaggcagcaaatcttcctcgcgccgcacgggatggagcagtttcatctggaaattcagaatctttacgccgcgctggcccagccgacggaaaagctgacggtgtcctatcccgtttcggacggaaagggcgcggagaagcggccatcgttcgtcatcgggcgcatcgcgcgtctgctgccgtcgatcagcgtcgaaacagagagcgctgacaaggaatatcgcctgtcagcaaagtcgacggcgctcgagtacgcgggcgagcatatcggcggcgcgctgtggcagtattttgaaggacagggcgacgcggagcgtgcgcttgccgcgatgaaggacgcttcgcgctatacgcgcgggcatctgtcgcgcgacgcggtgcacgcgctctacggcggcgcggtgacactgtccgcctcgcgcatggacatggcgcgctcatgtcactttgcctatttcatgcgctacggcctgaaagccagggagcgcacgggcgcgggctttgacgcgccgcagatcggcacgttcgtgcacgatgtgatggagcatacgctgcggcaggcgaaggagtgcggcggactgcatacgctatcgaaggacaagctgcacgcgctcgtgcgcgcgtcgatcgaggaatacatcgaccgcgtgctgccggacttgtgcgaaaaaagcgcgcgcttccgttatctgttcaaccgcctgtgtgcgacggtcgagcgcatcatggacgaggtgagcgaggagctgcaaagctccgactttgagccgctggcatttgagctggaatttggtgcggacgggcagctgcccgccatcacgatccgtgaggaaaacggcacggcgcgcgttgtcggcaaggtcgaccgtgtggacggctggctgcacgacggcaagctatatttgcgcgtcgtggactacaagacgggcaagaagagcttcgacctcgccgagctgcgctacgggctggggctccaaatgctgctctacctctttacgcttaaagaagagggacagatgcttttcggcggacacgagatcgttcccgcgggcgttctctacacgcccgcgcgcgagccgatgctgcgctgcgcgcgcgatacggagcccgaaaagatcgaaaaagcactcaaaaaggagctgcgccgcagcggcatggtgctcgaggacccggcggtcctgcaggcgatggagcacagcgcgctcgaatcgccgtgctacctgcccatcgcggtgaaaagggacggcgcggtgacgggaagtctcgcctccgccgagcagctcggaaagctctcgaaatacgtcgaccatattttacatgaaatcacgcaggaggtcttcgcgggcaacattgacgccgacccctacgcgcgcacgccgcagcagtcggcctgcacctactgcgagtttgcgagcgcgtgtcactttgaaaacggctgcggcagcgaccgtatggaatacatcaaggcgacgaaaaacgacgaattctggcagtacattgacgaggtgaacggagagggggcgcacgagaatggctgaaaagctgacaaacgaacagcaagcggcggtggacagccgcgagcgcagccttcttgtctccgcggcggcgggctcgggcaagacaaaggtgctcgtcgagaggctcttttcctacgtggagcgcgagggcgcgaatctcgacgatttcctcatcattacctacacgcgcgccgcggcgagcgagctgcgcggcaaaatcgccaaggcgctcaccgagcgcatggagcgcgaccctggcaactaccacctgcggcagcagatgctgcgcgtctaccgcgcggacatcaagacggtggacgccttctgcaccgcgcttctgcgcgaaaactgccatctgctcggcgaggacgcgcgcggccacgcgctgcggcccgatttccgcgtgctggacgagaacgaggcgcaggtgctgcgtgagcgcgtgctcgcgcgcacgctggacgatttttacgaccatctgacgcccggcggcacgctgctggccgacacgctcggcgcggggcgcgacgacagcgcgcttgaggacttagtgctcgagctgcacgcaaaattgcaggcgcagccgtatgaggacaaatggctcgaggcgcagcgcgcgttttggcgcgccgtgccggataagatcgaggacacgccctatggaaagattctgctcaatgaggtgcggcgcaaggcgcgccactgcaaaaaccttttgcagcgcgcggcgcaggagatgtgcgcgaatgacgcgctgaaccagaagtatgcgcccgcgttcctcgacgcgtcctaccagcttgaagcgctggaggggaagaccgcagagggctgggacgccgcgcgcggcgtgaccatcgcgtttccgcgcctcgccgcggtgaaggacagcgacggcggcgagatgaaagcgcgcatgaaaagcctgtgggacaactgcaaggagaccgtcaagggctttgccgagattttttccgcctcgtccgacgaggcggtggaggacctgcgcacgatggcgcccgcaatgctcgcgctcatcgacctgacggcggacttttcccgccggtacaacgaggaaaagcgccggcggaattctgccgacttctccgatcaggagcacgaggccatccgccttctcatcggagaggacggcgcgccgacagagcttgcgcacatcgtcagcgcgcgctaccgcgagatcatggtggacgagtatcaggacaccaacgaggtgcagaaccgcatttttgacgcaatttcttgtaaaggagaaaaccttttcactgttggtgatgtcaagcagagcatctatcgcttccgcctagccgacccgcgtatttttttgcagcattataacacctggccgccgcttgaggacgcagaggagcacgacagcgcgaagctgctgctctcgcgcaacttccgttcgcgcaaagaagtgctggacgcgacgaattttatcttctgcaatattctttccgaggaaatgggtgagctcgactacggcgcggatgaaatgctgcgcctcggcgcgaattatgtcgaatcgagcgcgtgcggcgcggagttccacctgctcgacctgccgacgcagacgggcgagcagcgcgtgcgcgcaagcgaggctgaggcagcgtttgtcgcagactatatcagcaatatgctgacaagtgaatttcctatacaggatgacaaaacaaaagagctgcggcccgtgtgcgaggaggacatcgtcattctgatgcgctcgccgagcacgcgccttttggactatcgccgcgcgctggaggcgcgcggcctccactgcgccgctgacgcgggcgaggacttttttgcctcgatggagatcgcagtgctgttcgcgctcttgcaggtcatcgacaatccgcggcaggacgtgccgctcattgccgtgctgcgctctccgctcttcggctttacacccgatgaactcgcggcgatccgcgcgcggcagcgcacgggtgacttctacgatgcgctgcttttgagtgaggacttccacagcagagaatttctcgatacgctggacgctttgcgcaatagcgcggcgcacctgagcgtgcgcgagctgctgggcgaaatctaccgccggtgcaacgtgctcggtatcttcggcgcgatgcgccgcggggcggagcgcaaggaaaatctgctcgcgtttttggagctcagcgaagactacgcgcgctcggggcggcaaggccttttcgactttgtgcgcacgctgcgcgagcagcttgccgagggcgaagcgggttcgatgcagaccgcgcacgcatcatcaggcgttcgcatcatgtcgatccacaagtcaaagggcctcgaatttccggtcgtgatcctctcggacctcgcgcgtcgcttcagcaatatggactttttgagttcggtgctcgtgcacccgcagctcgggctggggccggtgtgcgtggacatgcaaaggcacatccagtacccgacggtcgcacggcaggcgctcgagcgcacgctgcggcgcgaggcgaaggccgaggagctgcgtgtgctgtacgttgcgatgacgcgcgcgaaggaaaagctcgtcatggtgcacacgcaggcaaacgcgaaaagccgcgtcgccgaccttctggcgctgagcgattgtcctgtgctgcccgaggctgtggacagcggcaagtgcatgggcgactggatcatgctgccgcttttgcagcgcagcgaagcggcgtccctgcgcgagcttgcggggcagagcggcgaggggagcttctatgctgacgaaacgccgtggacggtgcgtgtgcacgacggtttgagctttgtgacgccgcagcagcggcccgatgacgcgccagtggatgccgcgccgccgaaggatgagctgtcggtggattttgctgcgctgtcgtaccgctacccctacgcggggcagacggcctttcccgccaagctgacggccacgcagctcaagggccgcgcgctggacgaggagatatccgaaaatgcaacgctcccaccgcggctgcgcagcctatataaaccaaaattccttgcgggcgaaacgacgctcacgggtgcggagcggggcacggcgctgcaccttgtgatgcaggaccttgactttttctgcgaagcaagcgagcagagcgtgcgtgagcaggtcgaaaggctcagagcgcagcgcaagctgaccgacgagcaggcaagcgccgtcgatgtgcgcgcgatcgtccgatttttgcgaagtgatcttgccgcgcgcattcgcaagaatgcgcagacggtgcggcgcgagtaccgcttctcgctgctgcggccggtgcgggactttgccacgctggacgccgacgacgcggtgctgctgcagggcgtggtagactgcttttttgaagaggacggcgagcttgtggtcgtggacttcaagactgaccgcatcggaagagcacagatcgcagaacgagctgagcactaccgtcctcagcttgaggcatactccatggcccttatgcgcgtgatgggcaaaaaggtcagggaaaaggtgctgtatttcttctcggtcggcgaagaaaaggtgctgtgaatacataaaaacaccctccgcgggaaatccgcggagggtgttttacaagatttgctcacacgataaaatgctctaagatcagcactgtcgcgcagcagacgagcgagacggggagaagtcccagtccgcaccaggcggcgacgataccgatgaccatggccgccgcgcccgcgatgggcgactgcgtggcgttcatgatggcggggaacgtcatcaccgcgagcgtgacgtagggcacgtagaagagaaacgagcgcaggaagggattctggatcggcttgcggatcagcgtgagcggcaggacgcggatgagataggtcgtggccgccatgacgaaaagatataaatacgttttcatgcgacgagatcatcctccttgtgcgggaacagaatggcggcggcagcagagatcacgatggtcaagaccaggatgcgcatgccctcggacagctcgcgtgtgaacggcaaaacgcttgcaagaagcgagcagagaaagctcacgccgatgcagccgagcacgatgcggttctgcttgccgacggggatgatgatggcgagaaacatgccgaacagcatcacggagcaaccgctgacggcccagacgggcatgagattccccatcagcacgccgagcacggtgccgatgctccagcccggcatggccgcgcacatggtgccgaagtaataccacacctcaagatacccaggctgcgcgatggcgaggccgaagatctcatccgtcaggtcataggcgatgaggagccgccagggaagcggcgtatcgggcgagagacgctggctgagcgcacagctcatcagaagatagcgcgcgttgacgaccagcatcatcagcgccatggcccagaggccggagtcggcggcgatgatggtgatgccgccgtattcacccgacgaggcgttgttcaaaaagctcagcaaaaaaccctgaaaaatgctcaggtgcgcgttgtgcgcgctgatgccgatgccgaagctgacagcaaaataaccaagcccaatggggatgccgtcgcgcagtccccgcaggaaatgttttttcgacataattctgatgttcctttacttccaatcatccgtgcgcaaggcgcgcaagtgccattatacgactgaaaacggcagaagtaaagagaaattgcataacgagcgttaaaaaattgacgataaaattagggaaaagtgctaaggaagagaaaagcacggagaggatcaaaaatttctcttgcaatttgacacaaagcgtggtaatatcctatatggcttttttagaaaagtacatttggatcagaaagaggtgaacacgagcaatgaaggaaggaatccatcccaattatcagcagactactattacttgcgcctgcggtaatgtgattgagacaggttccaccaagcagaatatcaaggtggaagtgtgctctaagtgtcaccccttcttcactggtaagcagaagctggtcgataccggcggccgcgttgccaagttcaacaagaagttcggcctgaactaattcaatcacaaaagcagctctgctacggcagagctgcttttttctgcttttttggaacgctcagttttgcccgtcgggatattcgacgatgaaggggagcggctcactgagactttggtcgaggtagtttatctcctcgtagctgtcgccgcctgcaatggcgcgcacctggaagaggcggacgcgcagtacggtgtcgtccgcaaggttgacgacaagctcgcagacgagcggcgttgccccgagcgggagcgtgaaagcctccgattcgctgctggaggcataggcgaggtcatagtacgacacgccctctatgacggatgcgcccacggcttcggcgctgtcatcgccgacataggtgacggcgctgccatcgctgtacgatgcttcgagcggcacgcgcctgagcagctgattggcgcacgtgtattcaagacacgcactgcggatggacacatcggacagcgcgccgagagagatggtgccgagcgggatgccggcattgcccggcgtgaactggtactgccatttgctgccggcctgacgctcgtaggagatgggggagagaaagcttttgagctgcggctgatactgggatttgagattgctgatcgtatcgagctcctgcgactgcgtttcgccgttcgtcatgaagttgacattgatgccgagctcgtcgctcagagggacggttacactaccgtgcagatacccgaagccatcctgcgtaaggtcggcagagtagcccggccgatagctgtccagcggcgaggaattgccatggtcgatcacgccgatgttgacgatcgtgttctcactgatcgtcttcggcagaagagaaaaggcaagcgtgcactcctgctttttgaggttgacgcttttgacctcgtagctgtattgcgagatcaggctcgactcgcgcgccaaaatgtccgagacattattgctgatgccgttgatctggttggagaggttgctctgcacgttgtagagctggctgcgaaggtcatttacttgcatgctgagcgtgttgatgcggttgttgtaatgcacgccgacggcgatgagcgcggcgagcgccatggccgccacggccgcaccgccgatgatcttcttgtgctgtatgcagaaatcgcggaagctcagcttttccgcgggagctttttcggcgttgctttgaaccggcgattcggcggcatcctgctcgggtttggcatgctccagactgagcagctcgtcgacggaaacggagtagagcttagagagttcgatgagcttgctaagctccggctgcgtggcgccgctctcccatttggagacggcctgacgcgagacaccgagcttttctgccagctcttcctgcgacatgccgctcgcgcggcgcagttcgtagagcttttcatatagttccatgaaaggttcctccttggggaaatgttgctgcgttcgacgccgtgcactgcgcctttgcaggaaaagcatagcaggaaaacaggagaaaacgccaccaactgggcgtttctttttgtcaacctgaggttgcgtctgccttattttcgcatgagagggcaggaaatgtcaatgaaaagcgtttttgccttttcttttggcggaaaatacactataataaaaatgatttgtacagcgcagatttcggcgcgataaggagaatctatggaagaattgaaagagaacaacgcgccgcgcgacagagcgattttagtcggcctttcgtcgccgcggctcgatcgaaaagagaatgccgacgaggagagccttgaagagctcggtgcgctcgtcgaaacggcgggcggcgtcagcgtcggcgtggttttacaaacgctgccgtcgccgaacccgcacacattcatcggcgagggcaaggtggacgagatccgcgagctcgtcaagtcgcaggaggcgacgatggtcattttcgacaacgacctctcgccctcgcagatgcgcgttctgtgcgaagaattcggcgtgcaggtgctcgaccgcagcggactgatcctcgatatcttcgcccagcgggcgaagacaaaagagggccggcttcaggttgagcttgcgcagtatcaatacctgctgccgcgcctgatcggtatgtggacgcacttggagcgccaggcgggtacgtctggcaagggccccatcggctcgaagggccctggcgaaacccagcttgagaccgaccgccgccacatccacagaaagatcgacaagctgaaggcggaccttgaagaggtgcgccgcgtgcgcgccacgcagcgcgaccgccgcagcaagaatgaaattcccgccgtcgccatcgtcggctacacaaacgcgggcaagtcaacgctcctgaacgcgctgactggcgcgggcattcccgcgaataaccgcctgtttgacacgctggacacgacgacgcgccttctcacggtgtccgacacgctggatgtcgtgatctccgacacggtcggcttcattcgaaagctgccgcatcagctggtcgaggcgttcaaggcaacgcttgaagagcttgaatatgccgatcttcttctgcacgtcatcgacatttccgacccgcactggctcgagcaggcgcagatcgtggacgagctgatcgaagagctcggcgcgcagcaaattccctgcctgcgcgtttacaacaagtccgacctctacttcggcgatatccgcccgcacggggaggacagcgtcaacatcagcgcgaagaccggcgagggcgtggatgagctgcttgcgcgcatcgacaagctcctcgacaagggcacgcgccgcgtgacgatccacctgccctatgacaagggcgggcttctcgatatgctctaccgcgaggcgaaagtcgaatccgtcgaatatggcgagaccatcgacatcgtggccacctgcgtgccgcgcgtcatcggccaggtcaaggactatatcgagggctaccgcgagccgaaggaggactgggaggaatgacgtttgaaacgacgcgccttctcctgcgtccgtggtgcgagagcgacgcggagagctgctatcgatacgcgggggatccgtttgtcggccccgccgcaggctggccggcgcatacgagcgtggagaactcccgcgagatcatccgaaccgtcctctcggagccggacacgtttgcagtcattttgaaggaacggccagacgagcctgtcggctccatcggcgtgtttccgacggaagcgccggaaatcgggagtgagccggaaatcggctactggatcggccgcccgttctggggtcaggggcttatccccgaagccgtgcgagagctgctgaggtactgctttgaggataaaggcgcacagcgggtctggtgttcgcactatgccggcaatgaaaagtcaaagcgcgtgatcgaaaagtgtggcttttcttttcagctgacctgtgaaaggccggcgcttgtggacgatgcgctgcggccgacgcttttttacgcccttacgaaagaaaagtgggagaaaacccgctgaaaggaacattgaaaccatgacagagtaccttgtcccatacgcaaacgcggagagcgagtttgaagaaaagcgctcgcgcttcatcagccacgttttcctggtggagacggaggccgaggcccgcgcgcgcatcgacgagatgaagaagaaatactacgacgcgcgccacaattgctggtgcttcgtcctgcacgacggcaccgttcgctacggcgacgacggcgagccgcagggcacggcaggccagccgatgctgaacgtcttccagcgcgaaaacgtcgaaaacgtcgtgtgcatcgtgacgcgctacttcggcggaattctgcttggtgcgggcgggctgacgcgcgcctacgccaaggcggcgaaggacgcgcttgacaaagcgggcaaggcgcggatgcagccgttttccgtgctgctgctcgaatgcccgtatccgatgttcgagcgcataaagctgctgatcgagggacacgagggcaggatcgagtcgagcgattacggcgcgtcggtgacgcttacgtttcttctgcccgtgcagaaggtggcggacttttccgccgcgctcacggagctctccggcggacagctgagcgcggaagaggtcgagcagcgtttcctgcccggcgcaagggagtgacggcatgagtttgcgaagaaaaatctacgaggtcatcgaggtcgcggacaaggacgaccgcgacagtctcatttacgaccgcttcatgctcgtgtgcatcgcggcgagtattgtgccgctgtgcttcaaggagacgaatgcgctgtttatatggctcgaccgcgcaacggtcacggtgttcatcgtggactatctgctgcgctggtggacggcggacctaaagtacggaaagagcggaaaatgggcgtttctacgctatccgttcagctttttcggcattgtggatctgctgtccatcctgccgtctctgacgatgctgtcgtcggggttcaagttgtttaggcttttccgcctcaacaaagcgctcaaggcgctcaaatttctgcgctactcgcacagctttgaacttattttgaatgtcatcaagcgcgagaaacgagcgctcgcggcggtgtgtgtgctggcgggcgggtatatcgcgctgtcggcgctcatcatgtttcaggtggagcccgacagctttgacacgtttttcgacgccatctactgggcggtcgtcacgctgacgaccgtcggctatggcgacatctatccgacgagcgagatcggccgcatcgtgagcatgacgtcgtcgttcatgggcattgccatcgtcgcgctgcccaccggtatcattacggctggctacatgcgcgagctcagccgtgaaaagtgggactaaatagagagggcagaaccatggagatcagaacagcaacgatgaacgatctggacgcggtcgcggcagtggaagccgagtgctttcctgtggccgaagcggcgacaaaagaggaattcgccgagcggatcagatactacggcgaccatttctggccgatgttcgatggcggtaagctcatcgcgtttctcgatggctttgtaacggacgagcccgacctgaccgacgaaatgtacgcgaaagcatccatgcacgacgaaaatggcgcgtggcagatgctcttcggtctgaacaccttgccggagtaccggaaaaacggctacgcgggcgaactgctccaccgtgccgttgaggatgcgagaaagcaggggagaaagggtgcagtcctgacctgcaaacagcggctcgtcgactactacgcgaagttctgctttgtcgacgagggcgtgacagacaagtccgtgcacggcggcgttgtctggcaccagatgcgcatcacattttgatcgagactgacagaaaaaaggagcacgcttgcgcgtgctccctttttgcgatttttattgctttcccgcgaggtagtagtcgctttggcccggatggtagaacggacaggcggtcagcttgccgcgcaggaacgacgccatctcgtcctcatcgagttgctcgtcacagtagtagctgtcggactcttcatcgtagctgtaataaacgcagtcctcgcacaggctgatggacatgagatcatctcccgaaagaaattagtgctgatactcgaattcgagctcgtacatgctgacgatgtcgccgtccttgatgccaaggtcctcgagctgctggaaaacgccgttttctcgcagcatcttatcaaagaacatccggctctcgtagtcaccgaagttgacgttgctcataaggcgttcaagccacttgccctcgacaatgtaggtgttgtcctcgacggtgatcttgagcggctcgctcgcgtcgatcttcacgggcttgggaacgtactcgggctcgtagaccgtgacgggcgggagtgtggagagcttttcggcgatcttgagcacgagctcgcgcgtgccggtgtgcgacgcggcggacagggcgaagagaggatagccgagcggctcgacatgcgcgcgcagcttttcgagcaggctttcgtcctccatgatgtcggtcttgttcgcgacgacgatctgcgggcgggtggcaaggtcgggggaatactgcgagagctctgcgttgatagcgtcaaagtcctcgaccgggtcgcggccctcgctgcccgacacgtcgacgacatgaacgagcaggcggcagcggtcgatatggcgcaggaagtcgtgaccaaggcccgcgccctcggctgcgccctcgatgatgccggggatgtcggccatgacgaacgaaacgccctcgtcgacgtacacgacgccgaggttggggtagagcgtggtgaagtggtagtttgcgatcttggggcgcgctttcgacacaacggaaagaagcgtcgacttgccgacattcgggaagccgatgaggccgacatcggccagcagcttcagctcgagcacgacatcgtgctcctcgccctcaaggcccgatttggcaaaacggggcgcctgacgcgtcggcgttgcgaaatgcgcgttgccccagccgcccttgccgccgcggcagagaatgaacggctcggagtcggacatatccttgatgatctcgttcgattccgcgtcgcgcacgacggtgccgcgcggcacgcggatcgtgagatccttgccctgcttgccgaacttgcgcgcgccctgaccgtccatgccgttgtcggcgacgtatttgcgcttgtagcgaaagtccatcagcgtggacatgttgtcgtcgacaacgaggacgatgttgccgccgttgccgccgtcgccgccgtcggggccgcccgcggagacgtacttttcgcggtggaacgccaccgcgccgttgccgcccttgcccgcgcggcagaagatgcgcgccttatcaataaaagatgctgccatgttggcacctccttgaattcttgttattcctgaacaattagtgtatccgttttttgacgattcgtcaagaaaaacggaacgtttcacaaaaaagaaaaaatcgaaaaaagtagggaacttttttgtgctccctttcgtcaaaggaaaagacacaacgggaaaggaagcggaaaccttgaaaagactgcttgcattgatgatggtcgtcgccgtaacggcggcgcttttggcctgcacgaagggcgggcgcgataacgaagacggaaatgacacgcccaatcctgagccgcagtacgtcggcgcggacacgatgacgctgcgcgtcgtgggtgacggagaagacggcacactcattttggcaggggagacggaggtctatgccctgccgctcgaaggcgtgacgctgtatttggacggcggcagtgtgtccgcttccgaaatcgaaagcggcatgagcgccgaggtctggtacaccggcggcgtgcaggagacatatcccgcgaagtttgcgcaagtggtggccgtgtccctctcgcgtgaggagaatgcgcagtatgacctctgcggcctctacttgcaggtgcttgagaacctgtggaacacggacgatgggctcaacggcggcgcggagatcgtgagcgtcgatctgagcaaggcaccaggcgggctgaccgcgggcgaaaaagcggcggtcgcctatgtgttcgcacagaagtacggcgtgcagggcctgacgatgacgttcgacgagctgcgcgaggagggctacctcacgggtgaaaagctggagggcggcagtacggcctattcgttcacgaatggtctgctcttcaccatcacgccggaggagacgcaggacaacggcgcgtctgtctgcttcagcgccggaaagtggcgctcgccgctcggcgcgtattactttacgaagtgcacggcctcccgcggcgataacggctgggaatacaccgtcggcgcggaagcgatttcctgagctacagcagattctttaattcagacagcgattcgacgatctggtcggcctcgcagcgctccggaacggggcggtgcgtgtggttgtaccagatcgttttcatgcccgcgtttttgccgccggtgatgtcggcggtcagcgagtcgccaatcatcatgcactcgtccgcggcaacatcgggaagaaaagcgcggcatgcatcgaaaaacgccttttcgggcttgcgatagccgagcgactccgagacgaatacatggtcaaaataggggagaagtcctgacatagagaggcggttgagctgctggtcgtggaaggcgttgctcgccgcgcagaggatatatttttccttgaggtagcggcagatctcgtccgcgccgtcgacgggaatggccgtctcgtagaggaggtccaaaaaccgcttttcaaacgcggcgccgtcggcctggatgccgagggcatcgaagatgcggttccagcggaactgaaaaagctgctgcgttgtgagctcgccgtgctcgatcatgagccagaggccgtcattgatgcgcgtgaacgtcgcgtaagtggaatcgtcataggggagaccccattcggcaaagccgatgcgcatggcctgctcggcgcatttgccgaagtcgagcagcgtgtcgtcgatatccatcaaaactgccttgagcatgaaaagtgacctcctgcggaaaagataaagaaaagagccccgagcattcgctcgaggctcttcattgtgcaattactcagcagggtaaacagaagcctgcttacgatccttgccgagacgctcgaaacggagcacgccgctctccttggcgtagagagtatcgtcagagccgataccgacgttgacgcccggatggatgtgggtgccgcgctggcgcacaagaatgttgccggcgagaacgaactgaccgtcagcgcgcttggggccaaggcgcttggcgttagagtcgcggccgttcttcgtggagccgccgcccttcttgtgggcgaaaaactgaagaccgatgttcagcatggtgatttgccatcctttctgtaagatgatcggaacagggggcttacgcctccatgacttcgatattgtccggatattcgctgtgcagctcggaaaagagcaacatcaaacccgttaaaagagcctgacaggtgctctcgttcgtggcggacagaccgccggggagccggaattccacagcgccggagcgttcatggaccttgacggaagcggcgaggcctaaaacatcgttcacggtgctttccacaaggcggaccgcacttgtgactgccgcgcagacgatatcgctgccctcttcgctgtaaccgctgtggcccttagcatcaaaaccgatgatgcgcttcccctcagtgaggaatgtaacagtggtcatgccttagacggagatcttgccgatctcaaccttggtataaggctgacgatgaccctgacgcttgtgatagcccttcttggccttgtacttgtagacacggaccttcttgcccttgccgttcttaacgacagtggcctccaccttcgcgccctccaccacgggagtgccgaacttggtgttttcgccgtcaacgatcgccaaaacctgatcgaaggtaacggcatcgcccgcctcgacggggagcttctcaatgaacagggtgtcgccctcgttcacaacatactgcttaccgccggtaacgatgatcgcttgcattgcttgcacctctttccttaattacggactcgctgtcgggggcgttcgaaaagtctcgaaaccttccgaaactttaagcccattcaaagcggctgttcaagtataacttctgactttgaaaaagtcaataggtttttggaaaattctctgtgcggttttgctcaggtgcaaagtgagtcgcggcacgtgtgccgcgaggaagcagcgccaaaggcactgcacgggtcaaaggggatattctctttgcaaaagagaatatcccctttgaaaccccaagagaaagactttgtattgtcagattgcagcttgaagaactgcacgcgctgcgcaatcaggtgcctgcttgatgatgtatctaaacgatttgactttcttctatcttcgctgtcgctttgcctgcgtgtcgttagccttacgcaatctccgtctacttcggatttgcacaaacttgctattacctgccaaggcggcattgcttcgctcgccgcagtacgcattaccaagacgatatgtattgccgatagtaggtgattaggctgcacaaaaacaagatgagcagagcggcagcggatagtagaagtagaggcaaatcgtatagcaaaagcaatggcggcgagcgttagcaatgccgccacgcaggtgcttccattccggaggcacaagggccattcaagcctgagactgccaatcagaacctttctcttgggggttcaagggggccattctcttttgtgaaagagaatggcccccttgtccgtgccccctgcgcggcgcggggaacacagagcagcgcatcgcgctgcaagaactgtaattttgcatataattgcccacaatacaaacaataactctgcaagttttatttggaaggagagcatttcaatatggaaaagcgaaaagagatgtggcgcgcgctgccgtttgtgatggcgctgttgttgcttaccctcgtgccgatgcagagtgcgtcggcgctgttcggcaagagcaaggaggaggtcaaggccgccgacggcgcgccagtggcggagaacatggagatcaaggtctaccgcggcgtcgcgtatgagggtgaattccgcgcggtggacaacgagggcgacgaggtgacctttgccatcgcgcaggagccgaaaaagggcatggtcgcgctgacggaggacggcctcggctttgtctacacgccgggcggcaagctggggacggacagcttcacctacacggcggccgatgcctacggcaacacctcgctgcccgcgacggtgagcatcacgatcgaaaaggcgaatagcggcgtctgctacgctgatatgggcggcagccgtgcgcatacggcggcggtcgatcttgccgagcacggtgtatttgtgggcgcaaagatcggggacagctatttctttgagcccgagcgcacgctctcgcgcggtgaatttgtcgcgatggcgctcgcggcaatggacgtgagcgcggaggatgtgcagatgactggcttctgcgacgatgcgagcatcccgacctgggcgaagggctacgccgtgagcgcgctgaatgcgggcgttgtgtccggcgtcagcacggcggagggcgttgcgtttcgcgcgaatgacgccattacgctcaatgaggccgcggtcgtgctgaaccggctgcttcgcgtgacggacgtggacctctcggactacgacgtgcaggacgcggacaacgcctggtgcgcacaggcggtggcgaatttgcagtccgtcagcgtgatcgagagtgggcgtttttccactgacgagatgcgctcgggcgtgacacgtgcgcaggcggcagagatcctcagcgcggcgatgacgctcaaggacggacgcgcgggaaagggcggactgctctccggcattttcggctaagggcaaaaagtgagaaaagcgaacaaaagagagcggttttcacgccgctctcttttgcttgtatttgggaaaaagctgtggtaaagtataaactaatatagtatggataaacggggacggcgacgtccctttcaaaaataaggaggaaaacggtatgcgtatcgttgttttagcaggtgggctgagtatggagcgcaatgtgtcgctctcgagcggcaacaagatctgccgcgcgctgagagcgcgcggacatcaggccattctggtggatatgttcatgggctttgaggactacgacggtaagctcgaagatgttttcgacgcaccggacggcttctgcggcgactattccgtcgccgaggcggagcccgacctcgccgctgtgcgcgcgagccgcaaggaccagagcaagagccttttcggtcccagcgtgctcgatgtgtgcgccaaggcggacgtcgtatttctggcgctgcacggcacctgcggcgaggatggccgcgtgcaggccgcgttcgacctgctcggcatcccgtacacgggtgcgggctacctctcgagcgccattgcgatggataaggacctgacgaagcgtcttgtgtcggaatatgtcatcacgccgcagtggcgcaccgtgcgctacacggaaggcgacatcgcgcgccttgtgtcggaaacgaagctcccttgcgtcgtcaagccggtcgccaacggctcgtctgtcggcgtctccatcgcgcatacgggcgcggagctcaaaaaagcgcttgaagagtgcttacagttcggcgcgcaggtcgtgctcgaacagtacatctccggccgcgagatccaggttggtatcatcgcgggcaaggcactgccctccatcgaaattatcccgaagacgggcttttatgactacgcgaacaagtatcaggccggcgcggcggaggaaatttgcccctctcccatcccagaggactgggagatgcgcgtgcgcaccgcgaccgagacggtctaccgcctgatcggcctgagcgtttattcccgtgcggacttcatcgtcacgcccgacggcacgccgtacttcctcgagatcaacacgctgcccggtatgacgaagacgagcctccttccgcaggaggcggcagcgatcggcatcggctacgaggagctgtgcgagaagatcgtcgaagagtcgctgaagcagagaagagggctgtaaatggaggccatcacggtaaaggaactgctcgcggcggtgcacggcgagctgctgcagggcgaggggacgacgaagatcctcggcgtgaacaccgacagccgcaccgttaagagcggcgaagttttcctgccgctcgtcggcgagcgcttcgacgggcatgactatatcgaaaaggcgctttccgcgggcgcggagggctgtctgtgcgcccgcgtgccggaaacgctgctgcctggaaagttttacatcaaggtgcctgacacgctgcttgcgctcaaggacttggccgcgtggtaccgtgcgcagttttctattccctttgtgcaggtgacgggcagcgtcggcaagacgacgacgaaggaaatgatcgcctcggtactgggcgtgaagttccatacgctcaagaccgcggccaactataataatgagatcggcacgccgcagacgttgctgggcctctcccgcgcacatcaggcggcggtgatcgagacgggcatggaccgcgcggggcagatccggtatcttggcgagatggtgaagcccgacatcgccgtcatcacgaacgtcggcgacatgcacattgaatacctcggatcgcgcgagaacattctgaaggccaagtgcgagatctttgaaaacctcaagaaggacggcctcaccgtcttaaacggcgacgacgagcttttgaacaccgtctctctgccgcagaaaacgttgcgctgcggcctgtccgagcactgcgatgtccgcgtcagcgaggtcgaagaccttggcatcgacggcattcgctgcgtcgtgacgacggcaaaggagcgttacgcgctctccatccccgtgccgggaaagcacatggtctacgccgcggcgatggctgcggccatcggcgagtatcttggcgaaacgaaggaagagatcgagcgcggcgttgcatcctacgagccggcgggttcgcgtatgcacgtcatcacgttctctgaaaaccgccgcctgctcgacgactgctacaacgcgggtccgcagtcgatggcggcgtcgctgcgcgtattgggcgcgagcggcggcaaaaaggccgccgtcatcggcgatatggcggagctcggagagctcaccgagcgtgcgcataaggaaatcggagaactcaccaaagagctcggcatcgacactgtcatcgcaatcggtgcacgggcaaaatactttacagaagggaacccctctgcgcagtggttcgggagcgtggacgaggcgatgggcgccgtcaaggcggcgttcacggcggagacggcgatgctcgtcaaggcctcgcactccatgcactttgagaagatcgtagaggaactgaccaaagcatgatcgacatcagtgttacgggactcatcaagtcctttgacctcgaaaagaaaatactggacggtatcacctttcagatcgacacgggcgagcgcgtgggccttctcggcaaaaacggcgcgggcaagacgacgctcttccgcatcctgacgggcgagctcgactacgacgcgggcgaggtgagcatcgcctcgggccgcaggctgggcctcatctcgcagatccccgtgtatcccgagggctacacggtcgaggatgtgctcaagagcgcgttttcgcgcatgcagaggatggaggacgagatgaacgccctctcccagcagatggcaagcggcgacgagagcgaagagacgctgcgccgctacggcgagctctcggccaagttcgagggtctcggcggctacgacaccgagacccccatcaacaaggtcgcgaacggcctttccatcccgccggagatgcgcgagcgcctgttcgacacgctttcaggcggcgaaaagacgcgcgtgaacctcggccgcctcattttggaggatacggatattttacttctcgacgagccgacgaaccatctggacctgcacgccatcgaatggctggagcagtatttgtcaacgtttaagggcacggtcgtcgccatctcgcatgaccgctactttttggaccgtaccatcacgcgcgtcatcgaggtgctcgacggcaaggcggagttttacagcggcaactacagcttctacgcggtggaaaaagagcgccgctatttggaaaagatgcgtcaatacgaaaaggagcaggccaagattgcccagcttgaaaagagcgctgagcagctgcgcatgttcgccttcaagggcatggacaagacgtaccgccgcgcgctgtcgatggaaaagcgcatcgagcgtatgcgcacgacggacaagccgacgaaggaacgggcactgagcgcgcagttcaagtcgcaggagttctacggcgacgaggtgttcgcgctcaaaaagctcaaaaagagcttcggcgaccgtgtgctgttccacgacgtggacttgcaggtgcgcggcggcgagcgcatcgcgctcattggcgacaatggcacgggcaagtcgacgctcatcaagatgctgatggaggaggaataccccgatgagggcaagatcaagttcggcccgtcggtgcgcatcgcgtatctgccgcagatcgtcgaattcgacgtgccggaacgaaacttggtcgacacgatgctttactccaagcgcaacatcacgccgcagagcgcgcgcaaccgcctggccgcgttccacttcacgggcgaggacgtttttaagagcgtcggcgtgctctcgggcggtgagctttcgcgcctcaagctctgcatcctgatggatgaggaagtgaacctgcttattctcgacgagccgacgaatcacctcgatatcgcgtcgcgcgagtggatcgaagaggcggtggaaagctacgacgggacgctcctgttcgtgagccacgaccgctatttcatcaaccgctttgcaacgcgtgtgtgggagcttgaaaacggcgtcatcaccgactatccgatgggctttgcgcgctaccggcaggtcaaggcgctggaggcacagaacaagatcgaccacacgccaaaggctgtaaaggaaaagacggttacagaaaaaccgaagccgaaccgctctgcccagcaggcgcggcggcagctcaccatctgtgaaaaggaaatttccgcgcaggagaccgccattgccgagatcgagcagcgcctcgaagaggcgggcggcgactacgagcgctacagcgaaatttataaggagaaggaagccgccgagcagaagcttggcgagctgatggaaaagtgggaaacgctcgccgagcaggcgggcgaatgaggaacataccatgaagagacagaaaagactgtggacggcggcagcggtctgtgccgtgctcggcgcggcgtgccgggctgtccccggcgtgcgctttgcaggactcctgttctggtgcctgacggcgcttttgatcgtctttgcgatgctcgagcagtacaaagagcatgcatgggcgaagtggggaaaacgcgttctgctcgtgctcgtgtgcataggccttgtcgcattcgggtatcttgaatcgctcgttattcgcggcgcgcacacggacgggcgcacggaagacgcgcagtgcgtggttattttgggcgcgggcgtgaacggcacgacgccgtcgctgatgctctcgtcgcggctacaggcggcgcttgacttcatcgcggacaagccggacatccccatcatctgctcaggcggtcaggggccgggggaggatatctccgaggccgactgcatggccgactggctcatcgcccacggcgtggacgagagccgcatctaccgcgaggaccgatcgaccagtacgcaggagaactttgcttacagcgaagagatcatggcggagctggggcttgatgcgggcgacacgttcgcctttgtcacgaacgactaccatatttttagggctgggcgcatcgccggaacagatgcggcctgcggtgtggcggcgacgctgccgcgcagcgcctattatgatgccttacagctcaactactatgtgcgggaggcctttgccaccggttggctcctgctgagaggaaactgagtatgaacgataacattttatgcctttactattcccgcacgggaaacacgaaaaaagccatggaggaggtcgccgaggcgctggactgcgaatgtctcgaaattcgcgacaaggtcgatcgcagcggcacgatgggctaccttcgctgctgctttgacgcgatgcacaagcgcacgagtgcggtttcgcgcccgaaatgccagaagccgctgtcggactacaagctcgtcatcctcggcacgcccgtgtggacgggccgctgttcgagcgtgattcgcggctttttgaagcgccgcggctatgagatccagaacgcggcgtacctcatcacgcacaagagcgagcaggactataaggacgtcttccgccagatggacctctatttgcagacgccgcacgtggcggaggtctcgctctgccccgattccgcgggctaccacttctggcgcgaccagttcgtcaaggcctgctctgacttcattgcggaggacaaggcctgatgtgggaaaagctcaaacagctcgcgcgccgctatgacgagatcggcgagctgctcgaagtgccggaaatttacgctgacccaaaaaagctgcgtgcgctcacgcgcgagcagaaggagctctccgccgtggtggagacctaccgcgcgtaccagaagtgcgaggacgacatcgtgcaggcgctggagcttgtatccgaccccgagctcaaggacatagcgcaggaggaattgaacactgccaaggcggaaaaagagcgcctttttgacgagctgcgcgtgctgctcctgccgcgcgacccgaacgacgacaaaaatgtcatcgttgaaattcgcggcggcgtgggtggagaggagagtgcgctgttcgccgcggacctctaccgcatgtacgcgatgtatgcggaaaagcgggggtaccgcgtggagctgctcaactacaacgacacggagctcggcggcgtgaaagaggccgacttcatggtcaatggcgatggggcgtattcgagattcaagtttgaatccggcgtccaccgcgtccagcgcgtgccggagacggagtccggcgggcgcgtgcacacctcgaccgcgacggtcgcggtgctgccggagatggaggaggtcgatgtcgacctccggcccgaagacattgagatgcaggtctaccgcgcttccggcgcaggcggccagcacgtcaacaagacgagctctgctgtgcgcctcatccacaagccgacgggcatcgtcgtttcgtgtcaggaggagcgctcccagctccagaaccgcgccaagtgtatggcgatgctcgcgagcaagctctacgaggctgagcgcgagcgcgtggagggtgcgatcacgagcgagcgccgcgcgcaggtcggcagcggcatgcgcaacgagcgcatccgcacctataacttcccgcaaaaccgcgtgactgaccaccgcctgacgggcgagaacaagaatttcaacatcgacgccgtgatgaacggcgatttagaccccatcatcgacgcgctcacgatgcaggagcaggccgaaaagctgcgcgagagcaccgaggcttaagaaagaagagagaacattggagacaaaatggtttaccctccgcacggtggaggataaagagagcatcgcgcaggcggcggacattctgcgccgtggcgggcttttggccatcccgacggagacggtctacggccttggcgcaaacggcctggacgagaccgccgtgctgcacattttcgaggccaagggccgcccgcaggacaacccgctcatcctgcacattccggatgcaagctggcttacgcgctactgcgaggatgtaccggacgcggcctacaagctggccgagcgcttctggcccggcccactgacgatgatcttaaagaaaaagccctgcgtgccgctgcgcacgaccggcgggctcgagaccgtcggcatgagatgtcccgaccatgcggtcacgcgcgccatcatcgaaaaggcgggcgtgcccgtcgccgcgccgagcgccaacacctcgggccgcccaagctgcacgacggcagggcacgtgcgcgaggacatgtggggcaagatcgacggtatcgtcgacggcggcccctgtcaggtgggcgtggagtcgacgatcatcgacctgacggtcacgccgccgcagctgttgcgcccgggcggactgccgctcgagagcctgcgcgatgcgctgggcgaggtgacggtcgacaaggccgtgacgcagaagatgaatgacggcgaaaagccgcgcgccccgggcatgaagtaccgccactatgcgcccaaggcccccgtcacggtcgtgaccggcggggcgaaggcgagtgcgcgctatctgctcacacacgcgggcgagaagtccggcatcatctgctttgacgagttcacgcggctcttcgacgggcacatcgtccaccccctcggtgcgagcggcgataagcgcgcgcaggcgcagcacgtcttcgacgcgctgcggacgttcgacgagacgaatgtgggcgagatctgggcacagtgtccggacagtaaagaccttggccttgccatcggcaaccgcctcaaaaaggccgcgggcttccatgtggaggacgcggacgacggcaagatcgtcattggcatcaccggcggcacgggcgcggggaagacgagccttctgcgcgcgcttgaaagaaagggcgcatgcgtgctcgactgcgacgcggtctatcacgagatgttaaaagatgacgagccgctgctgcgcgcgctgcgcgaggcgttcggcgatgtcatttttcggcaggacggcagcgtggacatccacgccatcggcctgatcgtcttcaaggacagaaaaaagctcgccgagctcgacgccatcgtgcacgagcgcatcccgcgcgcactggcgcagaaaatggcggcgacgaacgcggagatcatcggcctcgatgctatcaagctcatcgagagcggccttggcgcgatctgcgacgcgaccgtcgccgtaacggcgcctgaagaggtgcgggtcaagcgcatcatggcgcgcgacagcatcaccgaggagtatgcaaggtcgcgcatcgcggcacagaaggacgcggactatttccgcgcgcagtgcgattatgaatttgtgaacgatctgccgaccgctgaaaaggcggaacacgcggcagaggtctatatcaacacgatcatcaacaatttgaaggaggaaactgagagatgagtgaaaagaacaagctcgctgaaaaactgctctacgcccccaagaatggctatgaccgcctgagcgcagaggatgaaaaagcgatggaggcctattgcgaggactacaagaagttcctcaacaacggcaagaccgagcgcctttgcgtggagtactgcatcgagctggcggaaaagaagggcttcaaggcctacgaagcgggtatgaagctgagcgccggcgacaaggtctacttcaataaccgcggcaagggcatcatgctcgctgtcatcggcagcgaagacctgagccacggcgcgaacatcggcgcgacgcataccgactccccgcgcctcgacttaaagccccgtccgctctacgaggaggccgagatggcctactttaagacccaccactacggcggcatccgcaagtaccagtgggtgacgatccccctcgagctgcacggcgtggtcgtgctgcgcgacggctcgaaggtcgacgttcacgtcggcggcaaggaggacgatccccagttcatcatcaacgaccttttaccgcaccttggccgcgagcagggcaaaaagccgctcaacgaggccatcccgagcgagagcttgaacgtgctgctcggcggccgtcccatcgcggatgaggactgctccgaccgcttcaagctgggcgttatgcagtacctcaacgagaagtacggcatgacggaggaggacttcatctccgccgagctcgaagtcgtccccgccggcaaggcgcgcgacatcggctttgaccgcagcttcatcgcgtcctacggtcacgacgaccgcgtctgcgcgtatgcagagcttgcaggtatttttgacgctgtgtccccgaagaagaccgcggtctgcatcttcgcggacaaggaggagatcggctccgagggcgtgtccggtatgctgtctcaggcgtttgagtggttcatgggcgacatgtgccgcacacagggcgtcgcgctttctgactgctttgccaactccttctgcctgagcgcagatgtgacggcggcctatgacccgaactttgccgacgtgtacgacaagcgcaactccgccttcgtcaattacggcgtggcgctgtgcaagtataccggctccggcggcaagggcggcgcgagcgacgcaagcgctgaggtcgttggcaaggtacgcaagctgatgaacgacaacggcgtcttctggcagatggccgagatgggcaagaccgacgcaggcggcggcggtacggtcgcgaagttcatggcccagcgcaacatcgacacgctcgacgcgggtgtgcccgtgctctcgatgcacgcaccgtatgaaacggtcgccaagctcgactgctacatgacctacaagtgcatgaaggccatctttgagcaggcgtaagaaaatattctgagattccgagaagcgctctcccacaaatgggagggcgttttctgtccagaatcatgcaatggtgaacaaagtgtaaagtttcctgcgcttttgcttgcataagcgctcgcggcgtgataagctgtcataacgcttattgcaaaggatcagaaagggaagagagtcatgctccagttattcaccgatacgtccgcgaacctgccggtcgcgctgacgaaacaacaccacatcaccgtcgtgccgttttcctacacggtggatggaaaggagacggactatcccgatgatgtggatttcgacggcgcggcgttctacggcgcgatgcgccgcggcgcggtcgtcaagacctcaatggtcaatcccgacctgatggcgaactactttgaacgtgcgctctctcagggcgacgatgtgctctacgtcggcatgtccggcggcatcagcggcacggcgcaggccgcggtcgtcgccgcgggcgagctgacggaaaaataccccgcgcgcaagatcgtcacgatcgacacctacgctgcctcccttggcgaggggttacaggtgctcgaagccgcgcgcatgatcgaagagggaacgagcctcgatgagatcaaggtgcatttgctcgcgagaagaccgcacatgtgccagtttttcacggtcgacgaccttgcgtacttaaagcgcggcggacgtatttcgagcgcgacggcgctgatcggcacagtactgagcatcaagccaatcctgcgcggcgacgagacggggcacatcgtctcctgcggcaaggtgcgcggcatgaagcgcgcctatcaggagcttgcgaattactacgacggccgcgcgctcgacaagagcgagatgctcggcatcgcccacgcagacaatgaagagggcgcgcaggcgctcatcgcgctgctgcgggacaagggcttcaccggcgaatgcctgaacgtggtctacgagcctgtcaccggcgcccacgtcggcccgggaacggtcgcgctgttcttctacggaaaagaaaagtgaacataaggagcgccagaagggaaaccttcgggcgctttttatatggtagactttgcgcaaaagacctgatatgatgacaaaagagagattttgagagaaatgggagagttttatgaaaaagacatggctcatcagagcgctgctgctcatcgcctattgcgtgccgtttgcgtttttctccgtgaaaggcgatattacttcggggacgatgctgtattacggcgtgatgatcgtcagctttgtgattttgtaccgctgcgcgctgaaaacaaacaacgttccgatcatttttatcggaaatatactgagctttatttcttcctatttgacggcaaagctgacgagattggacccgatggaatggtactgtaagccgttcacatcccactcccagatcgtcgcgatatcggtcgcgtccctcatcatccatgcgatcatcgtatggagaagaggcagaaagcagaggaacgcacaggggtgtgacagaacatgaagaaacacaaaaaaaacgatgatcgcactgctgattgtagccctgttcggtatgatattggcctgcatttcttcccatccttttgtttcacgcaggtgcgaggtgccggaggagtatgtcgctgagatccgcgtgcagtcggtgggagtttactcaaagaaagtgcccttgctgccgatttacatttccatcgagcagttttcagcgggacgggcctattatacggttcactatttcccgtttggaacgcttggcatgtcctatagtttgaccgacggattttgccaggaaaatccgctgacgggcctgcaataagatgaatcggcagaaccggctgttttgccactggattttttcacccgcttctgctatgataaacgccaaagaaacgccgtggatcggcattgaattcaacccatcagcaaaggagaaccaaatatggaaacgatacaggccatcagaagcagaagaagcatccgtaagtaccagccaaaacccgttccgcacgaggtcatcgagcagatcatcgccgacgcggcctacgccccctcgtggaagaatacgcagatcgcgcgctatgtgctcgtcgaggaccgcacgacgatcgacaaaatggcggaggagatggtgcttgatttcaagctgaacgaaaagacgctcaaaaactgccccgccgttatggtgcttacctatgtgaccggccgctcgggctacgagcgcgacggctcgttctcgacgccgaaggaggcgggctttgagatgttcgacgcgggcatcgccgcgcagacattttgtcttgccgcatgggagcgcggcgtcggcaccgtcatcacgggctacttcgacgaagagaagatcatgggacttttgaacctgccggagaatcagaaggtcggctgtgttatcggtcttggctatcccgatgaggagcccgccgcgccgaagcgcaagagcgtggaagatttgctgacgtacaaataaaaagctgcaagcgcccgagaaaaacgccctcgggcgctttttcgctggattcggacaatgctttctggtaaaataagcagtataaaaatatagaaaaatgagagatatggaggccataagatgaaaaaatacagcttatcggttatttgcgtagtgctttttgccctgctggctggatgcggcaacaaggaaacgtcaaacataacggtcgattatggcgattcggctgtctacacagaacaggatatggatgatgcgataaaagtgatcgaagagatgatcggttcgtgggaaggctgcgaattacatagcatttcatattcgtcagatgacgtctgcacggatgaaaagaacctttcgtggatgaatgatttggaaaaggcaaatgacaacgatctggcttttacacaatgcatcatgttcgacagcagctttcgctctccgaaagagggcggcggagcttgggagccggacacggaatacacatggtcctggtggttggctcgcagcgatggcggggaatggaaactgatgacttggggatattaaagtgcttcccagtttgaggctcgtatttccgacggcacaaagggtatgcttttcgcgctttctgcaaatcctaccggaaatgactttcgggaggactttgccatgagaagcgaaacgaaaccctcgcaggacgaggagaagaacgggcaggagccgctgctgccgcccattcagccggtcatcgacttcggctcggtcgtcatcaaaaatagccgcgcggccatccactgcctgacgatcgccggacagatcgagggccacatgctgctgccgaacacgcagaaggcgacgaaatacgaacacgtgctgccgctgctggcgtatctggaggagagcgaggacatcgacggcgttttgttcctgctcaacaccgtcggcggcgacgtggaggcggggcttgccatcgccgagctcatctcggggatgaaaaagccgacggtctcgctcgtgcttggcgggggacactccatcggcgtgccgcttgctgtcgcgccgatggtaacgatgatcgcgccgtcggcgtcgatgaccatccatcccgtgcgcacgagcggcacgatcatcgccgcgccccagacgtaccagtattttgagcgcttgcaggagcgcattgtgcgctttgtgacgaaaaactcacgcatcgggcgcgacgagtttctgcgcctgatgatggacacgcaggacctcgcctctgacgtcggcagcgtgctctacggggaagaagcagtggcctgcggtctcatccagcgtctcggcagcctctccgacgcgctcgacgcgctgtatctgctgatcgacgaaaagaagaagtaaaaaagcctcgcagagtttgccgacggaagtcggcaaatagagttaaatcattttctgtcggggcatgtacctgacagaaaatacaactcaggctgcaagtgtgcgaattgttcgccgtaggcgaacaattcgtgcgcgcagcagactgaaaaagtttgtcggaaaaacccgttaggggtttttcgacagttttagacgccttcgggcgtctttttgcgctttgttcatcgaatccacttgaaaagatggcggaaaaatggtatatagtattagtcaaaatgtgtcattatacccttatcgtgggggatgacgcctttttccaaggaggatatcgctcgtgtacttaaaggcattggagatccaagggttcaagagcttcccggacaagacggtgctcaacttcggtgaggacatcaccgccatcgtcgggccgaacggaagcggcaaatcgaatatttcggacgccattcgctgggtcatgggcgagcagtcgagcaagtcgctgcgcggcgcgaagatggaggacgtcatcttcggcggtacggaaacgcgcaaccagatgggctttgcgcaggtgacgctcgtgcttgacaacaccgagcacatcttccccagcatggaggagaccgaggtcgccgtcacgcgccggtactaccgcagcggcgaatcggaatactatatcaacaagcagtccgtccgacttcgtgacgtaaatgagctcttcatggacaccggcatgggccgcgagggctattccatcatcggtcagggccgcatcgacgaaatactctcgcagaagagcggcgaccgccgcgagatctttgaagaggcggcgggcatttcgcgcttccgctaccgcaaggaggagacggaacgtaaattggagcgcacggaagaaaacttagtgcgcatcaacgacaagatcgccgagctggaattgcaggtcgaacccctgcgtgcgcaggcagagacggcgaagcagtatcttatctaccgcgacgaactgcgccttttggaaatttccgtgtggcttgaaaatctggaaacgctcaagacgaacgccatcaagctcgacaccgacctgtcgctcgcgcgcgaggagctcaaaaaggcgaacgcggatttagaggcgctgtacgctgcgtccgagcagttttccgcgcgcattcacgagaacgacatcgcgcaggaggaaaagcgcgcgcagctttccgagctcgacgcgcaggtcaaagagcaggaatctgccgtcgcggtgctgcaaacgggcatcgcgcacaacgaagagaacatcgcgcgcgtggaggaggaactcagaagccagtctgaccgcgtgggatcgatggatgcgcagattgcgcagcagcgcgcgcgtatcgaagagctggagagaagcaaaaacgaagtcgaaacggcgctctccgagcttttgaagcaggcggaggagctgtcgaaaaacgcgggcgaggccgcgagcgaggccgagaccctgcgcgggcgcgaggcgctcgccctgtccgccgcggcggacagccgcgccgaggtcgcggccctgcgctcgacgctttcggaaatggacgagcgcgagagcgccatcgccgccgagcaggagagcggggaggcccagctttccgacacgcgcaagagcgccgcggagaaccgcagggcgctcgagaccgcgcaggaggaggctgacgccatccgcaacatcatcgccggtcacacgatgaagatgcaggggcgcgtcgagcgcgagaaggagacgggcgaaaagcacgtttccctcacgatggaaatgaacaatttagactcccgcatccgcctgctcagcgagatggaaaaggagtacgagggcttcaacaaggcggtgcgcacggtcatgcaggcgtcggagcgcaaggcgctgcgcggcgtgcgcgggccggtcgccaatttgatgaaggttgataaaaaatatgctgtcgcgatcgagatcacgctcggcgcgggattgcagaacattgtcgttgagcgcgaggaggacgcgaagagcgccatccagctcttaaagcagcgcgacggcggacgcgcgacgttcctgccgctctcgtcgatccgcggcgaggcgttgcgcgatgcgcgcgtgcagaacgagtacggctacgtcggccttgcgagcgagctggtggaatacgaccgcgaatacgacggcattttcaagaatctgctcggccgcacggtcgtggtcgaggaccttgactgcggcatcacgatctcgcgccggttttcgaacgcgttccgcatcgtgacgcttgacggccaggttttgaaccgcggcggctcgatgacgggcggctcgatctctcgcagcgcaggcattctgagcagagccggcgagctgcgcgagctgacggcgcggcgcggcagtcttgccgaaaagctcgaccttgccgccaaggccgccgaggacgccaagcgcgagcttgccaaggcgagatacgagctggaggtcgcgcaggggcagcagcgcgcggcggaggacgccgtgctcaagctgcaaggcgacaaaaatcactatgatctgctgctttcctcgctgcgcgagcggctggaagcactggataccgagcgcgataccatcacccgccgccgcggcgaggtgaagcgcgccatggaagaaaaggaagcgctcgcgctttcgcaggagaaggaagcgggcgagctgcgtgcacaggcggaaaagagcctttccggccagagcgagctgctgcgttcgacctcgcgcctcggcgacgagatcgccgagaaaaagagcgtactcgcaggctatgccgccgagcgcgaaacgacggaaaagtcgctcgcgagcttggagggcctgcgtgcccagatgcagggcgacgagcagagcagaaaggcgctcattgagcagtacaaaacggcaagcgagcaggcgcggcgcgagatcggcgtgcatgaagaagagattgccgcgctgagcggcaaaatgacggaaaagcgcgcggcgctcgaagagctttccaaagcgaaactcgcacttgaagccgagcgcagccagagcgaccgccgcgggcgcgaactcaacgaaaatgtgctcaacgtggagcgcagcgtcagcaagctcgaacagaagcgcgcgacgagcgcgatggaggagcagcagatcctcgacaagctgtgggaaaactacgagctgtcgcactccgccgcgcaggagcagcgcattgaattagagagcgtcgctaaggcgagccgccgcatcggcgagctcaagcgcgccatcagcggccttggcgcggtcaacgtcggtgcgatcgaggaattcgagcgcgtgaacacgcgctacacctatctgacagagcagcgcgacgacgtggaaaaggcaaagggcgagctcgtcggcgtgatcgacagcatcacaagcgagatgaccgtcatcttcaaagagcagttcgcgctgatccgcgagagcttccaggagacgtttttggagctgttcggcggcggcaaggccacgctcgagctcgaggatgagaacgacgtgctctcctgcggcatcgagatcaaggttcagccgccgggcaaggcgctcaagacgatcacgctgctctcgggcggcgaaaaggcgttcgtcgccatcgcactgtacttcgccatcctgaaggttcatccgacgccgttctgcgtcatggatgagatcgaggcggcgctcgacgagccgaacgtggtgcgcgtggcgaattacatgcgccgcatcacgagcaaaacgcagtttatcgtcatcacgcaccgccgcggcacgatggaggcagcggacgtcctctacggcgtgacgatgcaggagcgcggcgtgagtaaagtgctgacgatcaatatgaacgacatggcgaaggaactcaacattaaggaataaagcgcgaggagaaacaaatgggtatttttgcaaagatcaaaaaggcgtggttcgacaccatcgtgtgggagaccatcgacgacgaattctatgacgaactcgaggacagcctcattatggctgacctcggcgcaacggtcgcgcacgacgcggtgaaaaagctgcgcgacgtcgtgtaccagaagagcatccagcgcggcgacgacgtgaagcaagcgctgcgcgagatcctcatcgaaaagctgaacgtgggcgacactgcgctcgacctgtcgaccaaaccgagcgtcgtgctggtcatcggcgtgaacggcgtgggcaagaccacgtccatcggcaagatcgcccaccgtctgaagggcgagggcaagcgcgtgcttttatgcgcggcagatacgttccgcgcggcggcggcggatcaactcgagatctgggcgaaccgtgccgactgcgagatcgtccgctcggttgagggcgcggaccccggcgcggtgctgttcgactcgctcgccgcggcgaaggcgagaggtgtcgacgtcgttctctgcgacacggcgggcagacttcacaacaaggtgaacctgatgaacgagctttccaagctccgcaagatcatcgaccgcgagacgccggacgccgcgaaggagacgcttttggtgctcgacgcgacgacggggcagaacggcttgcagcaggccaaggtcttccgcgagacggcgggtctgacgggcattatcctgacgaagctcgacggcacggccaaaggcggcatctgcgtcgccatcgcgcaggaactcggcgtgccggtgaagttcgtcggcctcggcgagggcatcgacgatctccagccgttcaacgcggaggaatacgtcaaggcgctcatctgatgggaaaatcataaacctgcgagacaataaggagacgaatatggaaatcacttctgtttgcccctattgcggaaaggaaatgcgagatggagccatccctgccttgcgtgatatttactggtgtccaagaggtgaggacggcatgctcaaagacggatttggcgacgagaaggaacaggtctggcttggcagagcggggctgttaggagattattacacgcccgcccgttactgtgagagctgcaaggtggtcatcgtgcccgtgccggagatcgagtggccgctcgataagctcgacaaaaagttcacggcatggcaggaaaagatgagcgcgcagcgcgaagagcgcaaggcacagcgcgaggaagaaaagcgcgaagaaaagagcagaaaaagacgggaaaaagacccgtgggaggtttgacgatgaaatttgttttggcaacgcagaaccccaagaaattgaaggaaatgagcgctattctgggcgagctcggcgtggaggtcgtgtcggaggccgacctcggcgtaaagatcgaggtggaggaaacgggcgagacctttgccgagaattcgcttctcaaggccaaggccgtcatggaggcgacgaagctgcccgccatcgcggacgattcgggattgtgcgtcgacgcgctgaacggcggccccggcgtttacagcgcgcgctttggcggcgaggggctggatgatatcggccgctaccgtcttcttttgcagatgatgcacggtcaggccgaccgccgcgcccacttccacacgacgatcacctgcgcgttcccgaacggcgacgtcttgcaggacgacggcgaggtcgagggcacgatcgcgttcgcgccgatgggcgaaaacggcttcggctacgatcccgtgttctttgtgcctgacaagcggaagacctttgcacagctgacggcggaggaaaaagcggagatttcgcaccgcggcaaggcactgcgggcattcaaggaaacgctcaagaattatcttgcggaacatcaataaaaaggataaggaaatactatggaattaagcagcaaacagcgcgcgtatctgcgcagcctttccaatgacctcgacgtgatcgtccacatcggcaaggacggcatcggcgacaacctcgtcaagcaggcgaacgacgcgctggaggcgcgtgagctcatcaagtgccgcgtgcttgaaaacagcatgctcaccgcgcgcgaggcgtgcgacgagctgagcgccttgacgcgcagcgagcaggtgcaggtcatcggcacgaaattcgtgctctaccgcccctcgcacaaaaaggacaagaaggacaagatcgtgctgcccaaggcagcgaagaagaccgtgtaaaagagaaaaagaggtcgaacaaacttgaagatcggaatttacggcggcagcttcaacccgccgcatctgggtcatatggccgcggccgagagcgcggcaaaatatctggggatcgatgagctcctgctcatcccggcgggcatcccgccgcacaaaatgctctccgccgacgcggcgggggtggacgaccgccttgcgatgacgcgcctgatgggcgagcagatcgcgctcgacacgggcgtaaaggtcacggtctccgacatggagatcgcgcgcggcggcaagagctacaccgcggacacgctgcgcatcctgcatgagcagcgccccgacgatgagctgtggcttctgatggggacggacatgttcttgacgttccagtactggtacaagccggacgagatcgtgcagtatgcgggcctgtgcgcctttggccgcacggaaaaggacggcgaggagcttttcgccccgcagcgcaagtacctcggccaacgctttccgggcagccgcgtcgtgacgatgacgctgccgaaccttgtcgacgtctcgtcgacggagctgcgcgcgcgcatcccgaagagggagacggaggggcttctggcccccacggtgctgggatatatttaccgcaagcatctttatggaacaaatctcgatttaaaacgtctaaccttagaggacctgagacccatcgcgctctcctacctcaatgccaagcgcatcccgcacgtgctcggcaccgagcagacggccaaggcgctcgcggaaaagtacggcgcagacgtcgaaaaggcgcgctttgccgcgcttctgcatgactcgaccaagcgtctttcgatggaagagcagctcgcgatgtgcgagcactaccacatcgcgctcgacgagctggagcagcatgcgctcaagctgctgcacgccaagaccggcgcggcgctcgcgcgcgacgtgttcggcgcggacgacgagatttacaacgcgatcttatggcacacgacgggcaaggcaaacatgaccttactcgaaaaggtcatctaccttgccgactacatcgagccgagccgcgactttgacggcgtggaggacctccgcaaggtcgtgtgggaagacttggacaagggccttgaaatgggccttgccatgaccgtggaggaaatggagcagatgggcaaccccgttcaccacaacacactgcaagcgctggagtatctgagaggacatacccatgagtgatcaaagagagatttacgagagagacagggaagacccctattacgaggggcggcacacgcaccggaaagagggctttttcgagcgcaactgcgacgaggcctgggagcaggtcaaggagaccttttcccgcccagggaggctctttgccaaggtgctgctcatcgcgctgctgtacggtgtggttgccggcggcagctatctgctgaaaatccgcgcgccggagctgccgagcaaggacactgacagcaagaataacaatagtgagcagatcgacggtatcgactatggcgacggcgtgcgcccgaaggcgggcggcgagcgaaagagcaaggatttctacaccgtgctcattctcggtcgcgacacgggcggcggcggcaacaccgacacgatgctgctcgcgagctatgacgtgacgaaccagaaggcgaccgtcatgtccatcccgcgtgacacgatggtcaacgtcccgtgggatatcaagcgtatcaactccgtctacaactactacggcgggggcgaaaagggcatcaaggcgctttacaaggagatttctcagctcgtcggctttgaaccggactatcaggtcgttgtcgaatgggacgccgtcggcgagatcgtgaaggccatgggcggcgtctattacgatgtgccgcgcaacatgaactacgacgacccctatcaggacctgcacatccaccagacgaagggttaccggcttctcagcggcagcgacgtgatgcaggtgctgcgttaccgccacgacaccgatatgcgctatggctatccggacggtgaccttggccgcatcaagacgcagcagtcgcttttaaaggcgatgatcgagcagcttttgcagctcaagaacgtgacgaagatcggcgactttgcccgcgtggtgaaaaacaacgttacctccgacctgacgtttgaggaaatgttgtggttcggctcgcaggccgtcatgggcgggctcaagatcgagaatgtcaacttcgtcacgatgccgaacacgaacaaatcgtgttacagccgcgcgtaccacagcatgcagtcttacgtgacgccgaacgcgcaggagctgctggacctcgtcaacaacgagctcagcccgtttgtcgagaagttcacgatgcgcgaccttgacatcatgtccgtcaactcggatggctcggtgtcctcgtccacgggccatgtggaggacagtaaggctgccaagccgcagaaccaccattcctcctctggctcacagaccggcacaggggacagcggcacgacgaccgacccgggtacggctaccgatcccggcaataccggcgacaacagcggcacgacggtcgacccgggcaataccggtgacaacagcggcggtacgaccgttgatccgggcaacacgggcgataacagcggtacgaccacgccaagcgagcccaccacgcccgtcgaccccgtgacgccgaccgacccgggtacaggcgagggcggaacgaccggcgacaacagcggcacggccggcagcgacgaaatgccggaatggctgcgcccgtaacgtaaaagaataaaaaagatcaaaaactcaaaataagaaaaggagaccccctatgttaccttccagagaattggccgagattgccgtcaaggcactcgacagcaaaaagggcaaggagatcagactcatccgcatcgacaagatcacgacgctcgcagagtactttgtcatctgcactggtacgtccaacacgcagatcaacgcgctgtgcgacgcggtggaaaaggaactgaccgaaaagggcgaggagccgctgcaccgcgagggctaccgcggcggcacgtgggttctgctcgactacggctgcgtcgtcgtccacgtcttcaacgacgaggcgcgcaagttctattccctcgagcacctgtgggccgacggcgaggaagtcgacctgagcgccatcctgccccacgccgaggaaaaataacgcttgacaaggcgggacaaaacgcctaaaatagttatgctgaatttatgcaaaacgcgatgacggagcaaaaagacgcgtgattttcacctgaagagagccggcggtcggtgcgagccggtgggaaaatgcgcgtggatgactcactcccgagcagtccgcctgaaagggcggaacggtcgcccccgttacgggcaaggctatgaagccgctgagggctcacggggaaccgtgcgctgaatcagggtggtatcgcgtaatgtgttcgttacgtccctgaccgtttgaaaaacggtcagggacttttttcgcatcaaaatactatttcacataaaggagaagatccatgaagtacgatttcgcagccattgagaaaaaatggcaggacaagtgggagcaggtaaagccctacgccgccgtgacgggggacaagcgccccaagttctacggcctgatcgaattcccgtacccctccgccgcgggtctgcacgtcggccacccgcgcccgttcacggcgatggacatcatctgccgcaaaaagcgcatgcagggctacaatgtcttgaaccccatcggctttgacgccttcggcctgccgacggagaactttgccatcaaaaaccacatccatcccgccatcgtcacgcagcagaacatcaagaacttcacccgtcagctcaagatgctcggctacggcttcgactgggaccgcgtgatcgacacgaccgacccgcagtattataaatggacgcagtggatcttcctccagctgttcaagcacgaccttgcctacaagacgacaatgcccgtcaactggtgcacgagctgcaagtgcgttctggccaacgaagaggtcgtcgagggcgtgtgcgagcgctgcggtgcacccgttatccgcaaggaaaagagccagtggatgctgcgcatcacgaagtatgccgaccgcctcatcgacgatctcgacgacgtcgactacatcgagcgcgtgaagacgcagcagcgcaactggatcggccgctccaccggtaccgaggtcacgttcaagaccaacaccgaggatgatatcaccgtttacaccacccgtgtcgatacgctgttcggcgtgacgtacacggtcatctctcccgagcacccgctgcttaaaaagtggaagagcatcatcaagaactgggacgaggtcgaggcctatcaggccgccgcggcccgcaagagcgatttcgagcgcggcgagctcaataaggacaagaccggcgttcgtctcgacggcatcgaggtcatcaaccccgcgaccggcaaggtcgtgccgatgttcgtctcggactacgttttgatgggctacggcaccggtatcgtcatgggcgttcccggccacgaccagcgtgactgggacttcgccacggccttcggccttcccatcgtggaggtcgttgagggcggcgacatcacgaaggaagccttcacgctcaaggacgacaccggtatcatggtcaactccggcttcttaaacggcatgaccgtcaaggaggccatccccgcgatgaagaagtacgccgtcgagcagggatggggccatgaaaaggtcaactacaagctgcgcgactgggtcttctcccgccagcgctactggggcgagccgatcccccttgtcaactgccccaagtgcggctgggtgcctgttcccgaggaggagctgccgctcgttctgccgcaggtggacagctacgagctgaccgacgacggcgagagcccgctctccaagatgaccgactgggtcaacaccaagtgtcccaagtgcggaggtcccgccaagcgcgagaccgacaccatgccccagtgggccggctcttcttggtacttcctgcgctatatggacccgcacaacgaccaggcgcccgtctcccacgaggcggaaaactactggggccctgtggactggtacaacggcggcatggagcataccacgctgcacttgctctactcccgcttctggcacaagttcctctacgacatcggcgtcgtgcacacgaaggagccttatgccaagcgcacgagccacggcatgatcctgggccagaacccgcactacgtcggcaacgtctccacgcaggaggagaaggacgcgctcatcgccaagtacggtaatcaggcgctccgtccggcggtcaagatgagcaagtccctcggcaacgtcgtcaatcccgacgatgtcgtcaaggcttacggtgcggacacgatgcgcctttatatcatgttcatcggcgattttgaaaaggtcgcgacctggtctgacgacgctgtcaagggctgcaagcgcttcttagaccgcgtgtggaacctcgccgatcaggtgacggatgaggagggcgtttccgaaaagaacgcgcccatcgtccacaagaccatcaagaaggtcacggacgatattgacacgctgaagatgaacaccgccatcgccgccctcatggctatggtcaacgagttctattcgaacggcgtcagccgcggcgactttgaggcgctgctgctcatgctctctccgttcgcgccccacatggtcgaggagctctgggagcagaagggctttgccgccaagcatgacggcaagatggcgatgcagtgcgattggcccgtctacgacgagagcaagaccgtcgcctccaccgcggagatggccgttcaggtcagtggcaagttcaagggcacgatcatcgtccccgtgaatagcgatcaggatactgttgtcgaagcggcgaaggcgaacgaaaaggtcgccaaggctatcgccggcatgcagatcgtcaaggtcatccacgtcaagaacaagctcgtcaacttgatcgtgaagccctgctgagcggaatttcggattttttcaaaaatatgaggaaagattattgacaagccgtgatttttctcatataataccaccgttagtcatgtgaatgactcttaaagagcgcccaggatcaagccgggtgtatcggagggagggaaaacataaatgtccgagatccacgtcaaggaaggcgaatctctcgacagcgcgctcaagcgcttcaagagaagctgcgccaaggccggtatcgtggcggaggtccgcaagagagagtgctatgagagccccagtgtcaagcgccgcaagaagagcgaggccgcccgtaagaaccgcaacaagcgttattactaattagctcaaaaaagacctgccatgtcgtggcgggtcttttttacacccttttccaaaggggtgccctgattttcccgtgcgagcgcgggagggggagcggcgtgcgcgccgcggcaccaaagggggtattctctttccgaagagaataccccctttgaatcccccagagaaaggcgaggggagtccccctcgatccccgacattggcagtttatagcttgaatgactgcacgcgctgcgcaatgtaagtgcggtgtacatggcttcgccatggatccctgcgagttgttactacgatcaaccgcgccttactatcgtgaggcgcgagtgacggtagcacggcggcagactgcgtgcggaatgcggcattgctgcgctcgccgcattgaggaatgccccgttagacggtgattactgcatacttctacaagatgggcagagcggcagcggataatagaagtaaaggcaaatcgtatagcaatgctaatgcggcttcgccgcgctatgggcagtgcaatcggcaagcattgcagctcttcgagctgctcgcttgcaatggcggggtcaaggggcagagccccttgcgttctcttgggggtccaagggggatattctctcacgtgagagaatatcccccttattccgtgcagcgccatcggcgctgcttttcccacggcgcagcgcgccgctcaaagctccggtaacagatctgatatctccggaaacatgagaaacgccgtctgaatgccaagtccttgcgcaaggcgcactttttgccgcaaggtctccgcatcgtcgaacagcacgaagtgcgtgccactgcccgcggagtaggtgaaatacttcgccatcagctcgcgggaaaaatagacggacgatggatgcttttcccgcagggcgagcagctcttcgcgcgtaagcggtgtgccgcagccggagggacaggggaggggaaagtccatcattacgcgttccaagtcgagcgccagacgctccgcgccatagcggcaggcggtttcctccagcagcgcgcgcagcgacccaccggaaagacccgtgccgacgaggagcgctgcgccctcggccgggagcgagagggggcagtagagcgccatcccccgcgcactcaggcgggcggagagacgcgagagaaacgaaagccggtcagaatacggattggtctcaaagtccgccagcacgccctgaaagccgcgcttgacgcattccgcgacgatggtgcggcagagcgtgtcgatgcgtgggatcgccccggtgcagcggtcggaaaggcccatgagcccgccgcgcgggaaagcggtcgcgtcgcagcgcgtcaggcacccgccctgaccgacggcgtaggccacgtggacgagcggcagcgcgggctttgccgcgcactcagagagcgcctttggcgtgatggcgaggtaggtgagcagaaaaatccccccttgtgaaaagcgcgttcggcgcgtataataaccgtaatacttttatgcgcgatgggagaccgatatgctcagattgctttgcccgcaatgggtgtttgacaattacgaggccgtgacgccggaatttttgaaagagcatggcgtgaagctgctgctctccgacctcgacttcacgctcgcgcccaagagccagagcgagccggacgagtcgctcacgcgctggatcggcgagctgaaggaggcgggcatcgagtttgcgattttgtcgaacaaccgcagtcccgtgcgcgtggaaaagttctgcaagccgcttaaggtcggctacgtcggccacgcgggcaagcccggcacgcgcggctttcacgaggcgatagcgcgctacggcgtgaacgcgagggagacggcaatgcttggtgacaagctgctcaccgacacgctcggcgctcggcgcagcggcgttctgatgctgatggtcgagccgcgcggcggcgcggtgggtgcgtggaaccatgtgctgcacgccttgcagcagccgttcaaggccgcaagcgcgcacgacgagcggaaaaaacgctgaaatttgcaaatttcacccacaacatcaggaaaaacacttgcattgccgcactatatgcggtaaaataccataggtttagaaccgatactttgtgaatttgaggatagcgatgatatcctcggtaatacaggaggaaatagttatggcaacgattaccgctggtgagttcagaaacggtaaagtattcgaaatggaaggcaagtactatcaggtcgtcgagttccagcatgtcaagcccggtaagggcgcggccttcgtgcgcaccaagatgaagaacgtcgtcaccggcggcgtgaccgaaacttctttcaaccccaccgcaaagttcgaggaagtggccattgagcgcaagaacatggagtacagctacaacgacggcgatctgtactacttcatggatcaggagacctatgatatggtccccctgaaccgcgacatgctcggcgatgcgttccgcttcgtcaaggagaacacgatgtgcatgatcctgtccatcaagggcaatgtcttcggcgtcgagccccccaacttcgttgaccttgaggtcaccgagaccgagccgggtcttgccggcaacaccgcgaccaacaccctcaagcccgcaaagcttgagaccggcgcggagatcaaggtgccgctcttcatcaacatcggcgacaagatccagatcgacacccgcacgggcgagtatatcggccgcgccaagtaatagacattaagtaagcagcaacaggaaaatcgtagttccggtaacagaaaggagttttacgatgggtatttctgaaaaagtcgcgtatctcaagggcctgatggagggcatgaacctgaatgcggattccaacgagggcaagctgttcctcgcgatcgccgacgttctcgatgagatcgctctcgaagtcgaagacctgaccgacgaggtcatggagctcggcgacggcctggacgtcatcagcgacgacctcggcgacgtggaagatatcgtctatgatgaagacgaggacgactacgaggatgaggaagacgacgaggacgacgaagaggagtgctacgccacgacctgccccgagtgcgaggaagagatcttcttcgacgattcggtcctcgaagacggcaaggtcgagtgccccaactgcggcgcgaccctcgagttcgaccccgccgaccttgtggaagacgaggaagagaaggacgactaagcgtctgaaaaccgtataaagtaaaggaccgccacagcaggaatactgctgtggcggtttttttctcggggaattgaaacgaaaagcgatcagttcaacggcttcacgatgctgtatccgtctgtttccatgtaggacattcccaccgtaccgaggggaaaataatgaatggtatagtgtacttcatttcctgaaaaactgtcgatcgtcgcgcagacggggatcaggggaagccttcgggaatacaccccttttgcctgcgcctcgattgccgctgaatagctttccggtatgtcgattttgcatgaaatgattgggttagaagataaaaaacaaagccctgcgaaaagcactccgacaaaaatgacggcaatcatcgcttttttcttcatggcaggatcctcctcagtcttcgatttgcctgtaaagtgcctctgcgatgtaaaaatgatagcacaggaaaaaacagatggcaagcgtcatcaacgcgacgcggatttgtttacaaatttccggttgtacggcgcgcgaaagcgtggtaaactacctcatagcatcgagcggcggcgctgccgccgaagcaatagaccggaaaggaagaacatactatgaaaattgcaattccctgcgagaatggcgaagtgatgcagcatttcggccatgccacggagtttaccgtttacaccatcgaggatatcaagcccatcgaaaaagagaccgtcacgtttgacgataccgaccacgagaaggtcgcgggcgggctcaaatcccgcggcgtcgatctcgtcatctgcgggaatatcggcgagggtgcgcacgccgctatcgacaacgcgcacatgctgctcatttccggtgtgaccggaaatgccgacgaggcggtcgacagcttcctccagggcaatctggagctgatgaccggcgacagcagcgcgagtgccggcggctgcggcgcgggctgcggggccggatgcagtgcatgcggcggtggctgcggcggttgtggcggcggcttccacgagccgtacgtcgagacgcgcacgttcaccgatatcgtcacgctgacggaagataacttccagactgaggtgctcgacgatccgggcctcatcatcatcgacttctgggccgagtggtgccagccgtgcaagatgatggcgcctgtctttgccgagctcaacggggaagaggacaaggtcaagttctgcaaggtcaacgtcgacgagcagccgaacctcgcttcgatgttcggtatcgactccatcccgacgctcgccgtcgtgcaggaccgccacacgctgaccggcatggtcggtgtgcacgataaggccgacatcaaggcgatgctggagaagtgcaaggcatgaaaattcgatacaacgaagacgcggaggtcgtcgcccgcctgcgcgccgcgctcttaaagcgcgatttacagtgcccctgccgcttgcagaagatcgaggacaacgtctgcatgtgcaaggagttccgcgaccagatcgctgaccccgaattcgagggctactgccactgccgtttgtactacaaggaaaagtaaaaattggttatagacctatggtattttaccacacgtctgaaaaaagcaccgcccaaggccggctccgcataagaaaatatgcggttttgcctgcacctttttggctgaaatacgaccgaaaaaatctccccatacgccagtatggggagattttttcaaccgatttcatctcaaaaattcattggcaaaactgcttcgcaccgaaaaagagcaaattttgtgcggagccgaggcgcggcggcgcaggcatgctgtcgcatggcaagacggcgcaacgaaggagtcagtgcaaaatttgccttttacggcgcatgttttcttatgtggagccggccaaggcggtgctttttcattccatcaagcgctgcatatcctgcggaataggcgctgtaaagtgtaattcctgtccggtgaccggctgggtgaaccacagctcgtatgagtgcagcgcggggcgggcgatgagggttttgtcctccgtgccgtagagccagtcgcccgcgaggggatgaccgaggtatgccatgtggacgcgaagctgatgcgtgcgacccgtctgtgggcgcaggcgcaggagcgtgaagcggtcgtttacttgcagagtctcgtactccgtgaggctcggaagtccgtccgcgcgcacgcagcggcggatgatggagccctctgcgcggccaatcggcgcgtcgatgacgccgcacggcggttcaactctgccgacggcgacagcgcggtactcgcgccgcagatcgcttgaatgcagcgcgcggcgcaggcggtcgtgcacgtagccgctctttgcggcgatgaggagacccgacgttcccttgtcgagcctgctgacgaagtgcggcacgctgccctcgccgagataattcgtcagcatcgctgcaaggctcggcgcggcggcgtcacccgacttcgggtgcatggcgacgcccgcaggcttgttgagcacgagcaggtcgtcgtcctcgtagacgatgtcaggctttgccgcatttgcgcagtacaagtcctcgcgcggcgtacgctcgctgaggacgacgctgacggtgtcgcccgcgtggacgatggcgttgacgtggacgctctgtccgtttaataaaatggcgttttcgcgccatttgaggcttttgagcagcgtgtaggaaagctgaagactgccgcgcaggatgcctttgaccatgcggccgtcctcctccggcgtcacggtgtatgtgagaatgcgcatggaagccctcctttcccgaagtaaacggcgcgtaaaattcacacatagtataccatcttcgcgcgaaaaatgatatactgaatcacacttcggcgctgccgaaaaacaagcaacaggagggcaatggcatggacaagagaaccatctgccttttgaacgattcctttccgcccgagatcgacggcgtggcgaacgccgtcgtgaactacgcgaaaaacatcacgaaaagcggcgaaaacgccattgtcgtcacgccgacaatgcccggcgcggacgacagcgcgttcccattccccgtgctgcgctacccgagcatcgacacgcgcaagaagctcggctacgtggcgggctatccgttttcacccgagaccgcgcgcgtgctgacggagcagaaggtcgaactgatgcacacgcattgtcccattacgtcgtgcctgctggcgcgctcgctgcgcgccgtggtcgacgcgccgctcgtgctgacgtatcacacgaagtacgatgtcgacatcgccaaggctgtgcgcggcaagctcttgcaggagagcgccattcgcgcgctggtgcagaacatcgcaagctgcgatgaggtctgggtcgtgagccgcggggcgggggaaaatctgcgctcgctcggctacgagggcgactacatcgtgatggaaaacggtgtggacgtgccgcgcgggcgggtgtctgatgaggccatcgccgtggcgacgggcagatatgacctgccgcagaacgtgccggtctttctcttcgtcgggcggctgatgtggtacaagggtatccgcatcattttagacgcgctgaaaacgctgcgcgagaaaaatgtcggcttccgcatggtgtttgtcggcgagggcgcagacggcgcggagatccgcagctatgcggaagagcggaagctctccgaccgctgctttttcacaggtgcgatctctgaccgcgagatcatccgcgcgtggtatggcagatccgacctgtttctcttcccgtcgacgttcgacacaaacggtcttgtcgtgcgcgaggccgcagccagcggtacggcgactgtgatgatccgaaattcctgcgcgtccgagggcgtgggcgatgggcgaaacggcttttgcatcgaggaaaacgccgcggcgatggcggcaaagctcgaagagctctgccgcgcgccggaggtgatgcaagtggtcggcgaaaacgcccagcgcgagttgtacgtttcatgggagacggcggtgcagcgcgccatggcacgctacgaggtcgtcatcgacaattaccgcagcggaaaatatccgaagcgcgagcgcttcggcgacgagtttttcaaaacgcagggtgggctgatggaggcctttgccagcgtgggcgagctgagcgaggagatcgccgcggagctgcgcattgagcgcgacgaggcgttgcagaccattgtccgttcgcggcaggagcttcgcgagcggttcggcgagacaaagcaggagctcgccgagcgctacgagacgatcctgcaaaagatggatcgctatttgtaaggaaaagacgagcaaaattcgctcgtcttttccttttagtcttcgtgcttcggtttttccgcagcgaaccacatgttccactggaaggagtacgccctacgcgacgcctcgttcgcgcaaattagacgcacgcgcgacggctgtgcgtgctcatagccgtagtccatgatggcgcgcaggatgcggtaggcggccttcaggtcgctgtctgtgcaggagagagtcagcgtgtcgccgtccgtgagcggcagaagctcggccgcacggtcggaggaggggagggcggcgatgtcgccgcagatgatctcaacggtcatggcagcctcctcagcggttcagatacgcgcggcacttcgcctccgcgtcgtgcgcaagctgttcttcgtcgactgtgacaagatgaccgtggtcgaccgtcacacggccctgaacgactgtgtagtcaacgggtccgcgcacgccgacagtgccgagcacgcttttggggtcaaagcacgagccgacgagctcgagcctgcgcgagtcgatcatgaagaggtcgcagcacttgccgacctcgagcgagccgatgtcgtcgctgcggccaaggatggccgcgctgccgcatgttgccatcttgagcacgtcgtaaccgctgggggcagctttgctgctgttcaaacggtgcagcaggaacgcgacgcgcagttcctccatcagcgatgagccgtcgttcgaggctgaaccgtcaaccgcgaggccgaccggcacgccgagcttcagcatctcgggcacgcgggcgacgccggaggcgagcttcatgttcgagatcgggcagtgcgccacgccggtgtgtgtctttgccagcacgcgcagctcctcgtcgttgaagtggatgccgtgggcgaaccagacgtcgctgcccgtccagccgaggcgctccatgtactcgagcgggcggacgccctcgcgtgcgagcatgaagttttcctcgtccttcgtctcgcacaggtgggtgtgcaggcgcacgccgtactctcgtgcgagcacggcgctctcgcgcagaaggtcggcagacacggagaacggcgagcacggggcgagcgcaacgcggtgcatcgcgccgaacgacttgtcgtggtatttctcgatgacacgggcagaatcggccatgatctcgtcgaccgtctgcacgacgctgtcgggcggcaggccgccgtccttgacagagaggtccatactgccgcgcgaggcgtacatgcgcgcgccgatctcgtccgacgcggcaaactgcgcgccgatgaggtcgcctgcgcccgcggggaagacatagtgatggtcgaagcaggtcgtgcagccgtgtttcatcagctcgccgaggcccgtgagcgtcgagagacggatgacgtcctcgtcgaggtttttccagatctcatagagcgttttgagccagtcgaagagctccatgttctgtacttccggcaggttgcgggaaaagacctgatagagatgatggtgcgtgttgacaaggccggggtagcagagcatgtggctcgcgtcaatcaccttttccgccttctgcggcagatttttaccgatcgcgcggataaatccatcctcggcatacagatcgacgttttcataaaccgtgtccgcgccatcgcacgacaccagcgaacgaatgttttgaatgagcagagtagacatagcaatacctcttagacccgcgccaaacgcaggcagatttagtgaaaaatagcaagaagcgcattttgctgcctccagcggcaaaacagctcaaaagcctcgcagagtttcacgccgcgcacggcgcaaatgaatttgatcgttttttgccgcggcgtgtacgtggcaaaaaacactttgcgcggagtgagtgtacgcgcctgtggcgcgtgcacagagcggagtgcgatcctactcaaaaacggcaaccgattcggttgccgtttttgaagattttttatctctcttcgcggaagtagctcagacccagcgatgcgggcggctgatcctcgcgcttcttgcgcagcgacacgataatcagaacgaccagcgtgacgacgtaggggagcatcttgtagagctccttgatggcaaggttggtgccggtggggatgaagatatagaggatgtagaacccgccgaacaggatggaggccagcacgctgacgttcggacgccagatcgtgaagatgacgagcgcgatggcgagccagccgcggtcgccgaaggcgttgttggaccagacgccgcaggcgtagtccatgacgtaatacaggccgccgagacccgcgatcatgctgccgatgcaggtggcaaggtatttgtacttcgtcacgttgatgccggctgcgtccgccgtcgccgcgctctcgcccacggcgcgcaggtgaagacccgtgcgggtgtgcttgaggaagtacgacgcgaacagcgcgatgacgatggcaaggtaggcaaggaagccgtaggacaggaagacctgaccgaaccagccgccgacattcagggatttgctgaaataggcgctcgtcgcgctcagcgcgatggaggggacttcactgtcggtcagcttgatgagcgagccgccgaagaagttgccgatgccgacgccgaacgtcgtgagcgcaagtcccgtgacgttctggttggcgcgcagcgtaacggtcagcaggcagtagagaaggcccatcagaagcgagcccaaaagcgagcagagcatcgggataccgatggcgaggaacgcgttcatgtcggcagccggggtggactgctcgtagaagaacgcgccgatgacgccgcagataccgccgacgtacatcacgcccggaatgccgaggttcaggttgccggacttttccgtcaggatctcaccggtgctgccgtagagcaggggaatgccctgcatgaccgcacggggaagaaaagcagttagatcaaatatcattgcttcacgcctccttcttgctcttgcgcaggctgaccttgtagctgatgaaaaactcgctgccgatgatgaagaagaggatgatgcccgtcaggatatcggcgaaggagtggttcaggctgaacacgctggagatctcgctcgcgccgcggctcagaaccacgataagaaggctcgtgaagatcatcatgatggggttgaacttggccatccaggagaccatgaccgcggtgaagccgcgtccgccgacgatggtggtggtcagcgtgtggtccgtaccggcggtgagcagcaggccgatgaggccgcagatcgcgccggagaggatcatcgtgcgcacgatgacgcgctcgaccttgatgcccgcatagctcgcggtgcgctggctctcaccgacaacggcgatctcatagccgtgcttgctgtaattgagatagatgtacataacgcccgtgaggatcgccacaagcaggatcgggaggaggtagcgctggccgccgagaacggggagccagccggcctcggtattctggttgatgataccgatcttgcccgagcccttgggcacttcccacacgatgatgaagaacgcggcgagctgtgtcgcgatgtagttcatcatgagcgtgaagagcgtttcgttcgtgttccacttggccttgaagataccggggaggaagccccacagcgcgcctgccgcgacggaggcaatgatcataatgacgatgagaagaccgttggggatcttgccgccaaggcagatcatgcaggccgcggtggcaaggcagccgatgagcacctgaccctcggcaccgatgttccagaagcgcatcttgaacgcgggcgtgaccgcgagcgagatgccgagcaggatcgcgaggttatggaacgtgacccagctcttgcgcgacgtaccgaacgcgccgtagaggatcgtggagtagaccttgatgggattttcgcccgtcagcagcgttgtgacgatcgcgcagacgatcaaagcgagcacgatcgcgccgccgcggatcaaaacggccttgtaccaggggagcgtatcgcgcttggcgatgtggaagagcgactgtttcttattcatccttgttgcctcccctcacgagcgtcatcagtgcgccgacctcgcgcttgtcggtctttctggcgtcgaccacgccggagacctgaccgccgcagagaacgacgatgcggtcacacagctcaagcagcacgtcgaggtcttcgccgacatagacgacggcgacgcccttcatcttctgctcggtcagcaggttataaatggtataggaggtgttgatgtccaggccgcgcaccgcgtaagcggtcatcagcacggcgggggactgggcgatctcgcgtccgacaagcaccttctgcacgttgccgccggacatgcggcgcacggggaaggacgtgctgggcgtgacgacgccgagctcttcccagatgcggttggcgagtgcttcgggatctttccggtcaaggaacagacccttacccttgcgccaggagcgcagcatcatgttgcccgtcatgcccatcgagccgacgagacccatgccgagtcggtcttcggggacgaacgacatcgaaatgccgctcttgcggatcttcatcgggtcgagaccgacgagttccttttccttgccgccgtcgggcggatagaacgtgacatggccggaggtgacggggtagaggcccgcaatggactcgagcagctcgcgctggccgctgcctgcgacgcccgcgatgccgagcacctcgcccgcgttgatggtgaagctgacatcgtccagacgcttgacgccgagctcgtcgtaagccgtcaggccttcgatgacgaggcgcttttcaacgtctttcggctcggggcggctgatgttcaggctcaccgtgtgaccgaccatcatgtcggtcagcgattgctggtcggcgtctttcgtggcgacgtcaccgacgtattcgcccttgcgcagcacggccacacggtcggacacgtcgagcacctcgtgcagcttgtgcgtgatgatgatgagagacttgccgtcggccttcatgttgcgcatgatggcgaagagcttgtccgtctcctgcggggtgagtacggcggtgggctcatccagaatgaggatgtccgccccgcggtagagcaccttgacgatctcgacggtctgcttctgcgaaacggacatgtcgtagatcttctgattggggtcgatgtcgaacccgtatttgtcgcagatctctttgacctttttgctggcttcggcaatgtcgagcttgccttcaaggccgaggatgatattctccgttgcggtgaaaagatcaacgagcttgaagtgctggtggatcataccgatgccgtgttcgaacgcatccttgggggaggcgatcgtgacgggttcgccgtgaatgtagatttgcccctcgtcggggaaatagatgccggagagcatgttcatcagcgtcgtcttgccgctgccgttttcgccgagcagcgacaggatctcgccctcgtgcagctcaaggttgatggcgttgttcgccaccactttgccgaaccgcttcgtgacattctccattttaactgcgcatgcagttcccaaggcggtcacccctttttccgctggagggcacaggaagaaagccccgcagcattgtatttgtacaagtcatatattagcataattgaacggcgttgtaaatgtaaaacagaaaaaaacacaaaaaaaattagaagcgtacaaaaatttttagcaaaatagcaaaaagtgccataaaaagaaaaaagatatcgggctgcccgaaggcagcccgatatgtagtagcagaaacaattagccgaaattagtatccagcagatcaatgccgtcgatcatgagctggaagtacggggcggaacgggcggtggactcggacagataaccgtcctggacgacctcggtgtcgggggtgtagtcgggatcggtgtcgacgtcagccatgtaagaggtgacaggctggccgtccacggtgaaagtggagcagtcgaagacgtggagctcgccgctctcgagcttggcggtcgcatcggcaatggcctcagcggtgccctcggcagcaacgttctcgttcaggtcggtcagcacgacggagccggtagcaagggtgccggtccagtcagcgtcgatggcctcgccgttcatggcagccttgatggcgtactcatagtagggggcccagtcgatgcgggaggagatcagataggtgttggggcaggcggcctcggtggaaccgttgtaggaaacgtcggggacaccggcggtctcgcaagcggtgggagcgcccatggagtcggcgtgctggctgatgagcttgcagccgttcttgatgagcttctgcgcgccttccttctcggcggtctcgtcataccagctgccggtgaaggtgacttccatcgtggcagtggggcagacggagcgggcgcccaggaagaaggaggtgtagccggagataacctcggcataggtgaaggcgccgacgtagccgatcttggcctcgtctgcggtgaactcaccgttggcgatcatctcgttgagtttcataccggcggcgataccggcgaggtaacggccctcatagatggaagcgaaggcgttgtggtagttggagagaccctcggtgtgcgccttggtgccggtggagtggcagaactgcacgtcggggaagtccttcgcggcctggatcatgtagtcttcgtgaccgaaggagtcggcgaagatgatgttgcagccggcgtcggcgagctcagcggccttgtcgtagcactcctgaccttcgggaacgttggtcacgatggtgtactcgacgccgagcgtctcgcaggcctctttcgcagcgttgatgaagttgaggtcgtaggtggagttttcgtcgtggagcatgatgaagccgaccttgaaatcggtgacttcgttgttgtcctgatcgtcggtgttggtatcgtccttcttatcgccgcaggcgacgagggcgaggaccatcacgagactcaggagcagtgcaaggaacttcttcatttcagtaaatcctccttaaattttacggcaatcaaaagatttgaataccgttatcaccatgatacataaaaaggaaaaatttagcaacaggaaaaagaaaaaatgagggtcaaacttgaccaaaaaagaattggttcttttagccatagcggagaaagaagcaaatattgcgtgaagaaaacgaaaaaagccccgctcgatgagcggggcttttaaagcaaagattacatctgcacgcgggtgccggtcttgccctcgatgccctcggcggccttttcaagcagcgtgatgagtgcgacgcggccgggcttgctttcggcaaacgacatggcggcctgaaccttcggcagcatggagccgggggcgaactgcttttcgtcgatatacttgcgcgcctcgtccggcgtcagggtgtcgagacccttctgatcgggcttgccgaagttgatggcgaccttctcgaccgccgtcaggatgacgagcatgtccgcgtcgagcagctctgcgagcttggcggaggcgaagtccttgtcgatgaccgcgggcgtgccgtagagcttgccgtccttgcgcacgacggggataccaccgccgccgaccgtgatgacgaccgtaccgttgtcgacgagcgccttgacagtgttcttttcaatgacgtcgatcggcttgggggagggaacgacctgacggtagccgcggcccgcgtcctcgaccatcgtgtagcccttttctgcggcgatgcggtcggcggtctccttgtcgtagaacgcgccgacgggcttggtcggatgctggaaagcggggtcagcctcgtcgacgagcacctgcgtgacgacggtcgcgacgtccttgttcatgccgcgggaggcgagctcgttgccgatggcgttctgcagatgatagccgatatagccctggctcatcgcgccgcactcggggaagggcatgtcggacttgatggccttggcctcagcggcggtggccatgccgaggttgatcatgccgacctgcgggccgttgccgtgggcgatgatgacctcgttgccctgcgcgatcaggtcgacgatgggctttgcggtctcggtgacgagggcgagctgctcgtagggggtgttgcccagcgcgttgccgccgagggcgatgacaattctcttgctcatgatgactatctctccttgattttttaaaaactctcttctctcaaaagcggctgtgccgcctttttacatatgaaatgcgccttagaacatcttgcgctcttcgccgctcttgtccatctccatcagggcgcggacggggtctttgacctgcgcgaggaacatcattgcggcgatgatatacggcttgtaggaagcctgcttgtacagggggacgatatagcggtcgaacacgctgttgtcgacctcgccctcagggcaggaaagaccggtaatgtcggcgggcaggcagtggagatagagcgccttgccgtccttcgtgagcttcatcatctcctcggtgcaggcccaatccttgtgctcggcgttctgcgcgagcagctttttctccagctcatcgatgccgtccttgtcgccggcctgatagagcttcgtgcgctcctccatggccttgaacggcgcccaggacttgggatagacgatgtcggcgtccttgaaggcttccttcatgtcgttgcacttcttgaagctgccgccggtggccgccgcgttcttcttggcgatctcctcgacctcgggcatgacctcgtagccttcggggtgagcgagggtgacatccatgccgaagcgggtgaacaggccgataacgccctgcgggacggagaggggcttgccgtagctcggggaataggcccatgtcatggcgaccttcttgcccttgaggttctccacgccgccgaagtagtggatgatgtggagcatatcggccatgcactgcgtcgggtggtcgacgtcgcactggaggttcacgagcgtcgggcgctgttcgaggatgccgtcgcggtagccctcttcgagcgcgtccatgaaggtcttctgatacttgtggccctcgccgatgaacatatcgtcgcgaatgccgatgacgtcggccatgaacgagaccatgttcgccgtctcgcgcacggtctcgccgtgtgcgatctgggacttcttttcatcgagcacctgctcctcaagacccagcaggttgcacgcggaggcgaacgagaagcgcgtgcgcgtggagttgtcgcggaaaatggaaatgccaaggccggaattgaagatcttcgtgttcttgttgcgctcgcgcaggtcgcgcagcgcgtcggccacggtgaagactgcgtcgatctcctcgtcggtcttgtcccacgtccagtagaagtcggtcttgtacatattattgatgtgcagcgtctcaaggtggcgcgccagttcaacagtcttgctcatagataattttctcctttattttatagtatattaaaaatcgtttgaaatatttgcgccgcgcacggcgcaaatgatcttgatccgttttttgccgcgacatgcgcgtggaaaaaaacacttcttacgcagcgcgcgtcgagccaaaggcgaggcgcgaagcggagcgcagcctcttaatatcaaatgacgggcgaagcacgttatttgatattattgcccgttaactcctgacggaaggaggtggcagagccgtccttgttctcgggcttgtagagaccggggacagccgcgtacagcgccgcgcaggtgacgaggtcctgcttccaggtgatctcgttgggcgcgtgggcctgagattcagcgccggggccgaagccgacgcaggggatgccgtagcggccctgaatagaaacgccgttcgtggagaacgtccacttgtcagttaaggggcgaccggtgcgcgtggacatggccttttcgtccgcaccgatgcgcttggtgccccagagagcgtggtgcgcgtcgacgagcgcctgcacgtggggcgcggtctccttgttgatccaggtggggaagaaggcctcggtctcgtagacgtggccggtccaggacggacggtcgtacatgtacatggagaccttgatgtcgttcgcgtacttcttgcacgcgggcaggtcttcaatctccttcaggcaggactgataggtctcgcctgcggtcatgcggcggtcgatggagatcgagcagctgtcggcgacggcgcagcgagagggggaggtatagaagatctggctcgtggtgcaggtgccgcggccaaggaagcgcgcatcctcccagtgctcaggattatacttcggatcgagcatcttgacaaggcccttgatctccttgtcatcagcggcgtcgttctcgttgaggtcgcgtacgttcagaatgacctcggccatcttgtggatggcattgtcgccgcgctcaggcgcggagccgtggcaggagacgccgtgcatgtcgacgcggatctccatgcggccgcggtgaccgcggtagatgccgccgtcggtcggctcggtggaaatgacgaattcaatctggtttctcgcgtcctcggggcccttgaagtattcgttgacgatggactgccagcacatgccgtcgcagtcctcctcctgcacggagccgacgaccatgatcttgtagccctcggggatgaggccgaggtccttcatgatcttcgtgccgtaggccgccgcggccatgccgccctcctggtcgctgccgccgcggccgtagatgaccttgtcatcctcgtagccctcgtacgggtcgtgcgtccagttttcgcggttgccgatgccgacggtgtcgatgtgggagtcgatggcgatgatcttgtcgcccgagcccatccagccgatgacgttgccgagcgcgtcgaactcgaccttatcgtagccgagcttcttcatctcctcggcgatgcggtgggcgacgcccttttcctcgcagctctcgctggggatggcgatcatatcacgcaggaagcgggtcatatcggggccgtaggcctgtgcggctttcttgatggcttcgaaatccatggtaaaacctccgttaaaagtaatagtattttctgtcgatcggggtcaattttctgttacactgtccttatcatagcataagaacgacagttgtcaaacaaaaaatttgcgtttcaaaaattttttaagaaagtaattgcaattcgatcaatttatggtattatagggatgaaagaacatgcccgttccgatggaaagctgtgcaatttgcacagcaaaatagggcggacgggcgatcagaggagggatagaccatagaagccgcaacgctgaagaccctggagcaggtcgcaaagggcatcgccgcgacctttggcagccattgcgaggtggtgatccacgatgtgggcgccaagcaccccgagcattccatcgttgccatcgagaacggccacgtcacaggccgcaaggtgggcgacggcgcgtcgcacgttgttttagagcaggtgcgtcaggccgacgcgcagccgagcgaccacttgagctacctcaccaaaacgccggacgggaagatattgaaatcttccaccatgtacatccgcggccggaacggcaaggtcgccgcgatccttggcatcaattacgacatttcctcgctcctgatggtcgaggatgcggtgcacgagttgattgacacaaaggatgagacgcagggcgagccggaaaagatcgtcaacgtcaacgatcttttggatgagctcatcgcccagtctgtcgcgctcgttggcaagcccgtcgccctgatgaataaggaggacaagatgcgtgccatcggctttttgagccagagcggggcgtttctcgtcacaaaatccggagacaagatcgcaaaatacttcggcatatccaaatacacactatattcttatattgacaaacaacaggaggagaagtgaaccatgggcaagatcgatttgaccatcaacaagaccggcctgcagcacaacattgagaaggccaaggaaaacaacgttatcatcccgaccatcgcgcagatgcagcatcctgagaccatccctgagaaaattcaggaaaagctcaagaccgtcggcctttgggacgtcaacccgctgaacctcttccgcatcacgtggaagaacgaagccaaggagaccggcggcctctatcaggccgtgccgaactatgtcgagatcccgtccgagctctccggcgttccttgccgcattctcgccatggcgggcaagtggttccccacgggctgccacaaggtcggcgcttcgttcggctgcctcgccccgcgcctcgtcaccggccagttcgacgcgacgtatcatcacgccgtgtggccctccacgggcaactactgccgcggcggcgcattcaactccaagctcttggcggtcgactctgtcgccattctccccgcggagatgagcaaggagcgctttgagtggctcagcaagatcgccggtcaggtcatcgcgacgccgggctgcgagtccaacgtcaaggagattttcgacaagacctgggagctcaagcaggaccccagcatgatgatcttcaaccagtttgaagagatgggcaacccgctgtggcactacaatgtcacgggctacgcccttgcagacctcttcgaggccgtgaagaagcccggccagcgtcttgcgggcgcgtgcttcacatccggttccgccggtacgatgagcgcgggcgacctcctcaaggagcgttatccagacatgaagctcggcgtgggcgaagcgctccagtgcccgacgatcctgaataacggcttcggcggccaccgcattgagggcataggcgacaagcacatcccctggatccacaacgtgaagaacactgacatggccatcgccatcgacgacgaggattcccagcgtttgctgcgccttttcaacacggcagagggcaagaagtacctcaaggaagagctcaagctctccgacgagcttatcgaaaagctcacgtggctcggtatctctggcattgcaaatgtcctctgctgcatcaagatggccaaatactatgagctgaccgaggacgatgtcgtctgcaccgttctgaccgactccgctgtgatgtacggcagccgcattgaggagctcaacgagatgcacggcgcgtacaacgccgaggaggcccgcctcgaccacaaccttcacatgctcggcctgaagaccgacagcatgatggagctgacgtacgaggaccgcaagcgcatccacaacctcaagtactacacctgggtcgagcagcaggcgcgcgacgtcaaggacctcaacgccctctggtacgacaccaagggcacgtgggacgctgtccacgcgcaggcgaaggagctcgacgagctcatcaacgagttcaacgaggccaccggccttctcaaagcgctctaagagcgcgaaaggggagcaggaaccccttgctccaaaccctgttaggatgataaaagggggtatctcgaagagatgcccccttttttatacccccaaaggggggggacgcgccctgcgggcgctgcacgaatgcgacccccattttctttcccgagaaagaaaacgggcgtcgcccgtccaaaagaaaggcgtttagattggcagtctcaggcttgaaggggcctttggcctccgaaatgcaactgcctgcgcgcggcgaagccgcgtttagcgttgctatacgatttggcctacttctattatccgctgccgctctgcccatcttgtagaagtacacagtaatcaccgtctaccgccagtctccacaatgcggcgagcgaagcaatgccgctatttcgcacgcagtccgccgccaagcaaacgtcactcgcgcctcacgatagtaaggcgcggttgagagttgtcacgaaacgcaggggttcatggcgaagccatgtacaccgcacctgattgcgcagcgcgtgcagctcttcaagataaaaactgccaatgtgcggggtcaaggggtaagaccccttgcctttctctgggggttccaaagggggtattctctttggaaagagaataccccctttgtctcgcgtccccctgcgaatagggggacaaaaagcagcagcgctttcacgctgcaaaaacccaccgcgcagcgcgcggacaataaggagttattatgttgaaaaacgtcaaatgcgcccgctgcgtcaagtgcgggaaagaatacgaggccacggcgaacctcacgaactgctcgtgcggcggcattctcgacatcatctatgactacgactacatcaaaaagaacctgacgaaggaaacgctcaagtcccgcccgaacacaatgtggcgctaccgcgagctgctgccggtcgaggagacgacacccgacacaccgctgcgcgtgggctggagcccgctctacgaagagccgcgccttgcaaagcagctcggcctcaaaaagctctgggtcaaggacgacggacagaacccgacggcgtcgctcaaggaccgcgcgtccgccatggcggtcgccaaggcgggggaggcgggcgcgaagatcatcgcctgctcgtccacgggcaacgccgcgagctctcttgcgggcaacgccgcggccgcgggcctcaagaccttcatcttcgttcccgagcgcgcgcccaagggtaaggtcgcgcagctgatgacctttggcgcaaacgtgatctccgtcaaaggcaactatgaagagacgttcgagctgtcgaaaaaggccatcgacaagtggggctggtacaaccgcaacgcggccatcaacccgtacctctccgagggcaagaagaccgtttcgatcgagatcgccgagcagctcgactggaagatgccggattatctcgccatctccgtcggcgacggctgcaccatcgcaggcgtgtggaagggcctcaaggacctgtacgccatcggctttatcgacaagctcccgcgcctcatttccgcgcaggccgagggctgccaccctatcaaccgcgccatcgcggagaacaagccctgggagccgatggaggagaacacgctggccgactctatcgccgtcggcgtgccgcgcaacgcggacaaggcgctcatggcaatccgcgagtcgaacggcatcgtcgtgaatgtgacggacgaggagatcatggcggcgcaaaagctgctcggcacgacctgcggcgtcttcggcgagcccgcgggcgtcaccggtacggcggcagtcaagaagctctgcgagcagggcgtgctcggtgagaacgacacggtcgtctccgtcgtgacgggcaacggcctcaaggacgtggccaacgccatcaagttctgcggcgagccgatgagcctgccgaacgaccttgacctgctggtcgaggaattcgacaagcgcggcatcaagaccgaggcataacagaaaaagaagagccccgcgaaccagacggttcgcggggccttttttatacaaagtgcttatttatgatagggacgcagttcagcagggcggagatcgccgtggaagctgcgaacacgaaaatcgcgagcagcggcacggagaaaaaggcgttgcatgaaaaggtatcaatgccaaagtgctgtaacagctcgatgaccatgggatgaacgagatacacgccgaagctgtattttgacatcttgcgaacaagggcatacgccttttcgcccatgcacgggaaattcaggtgctgcttggcaaagacaaagatcggcacgctcgtgaagagaacgttgaggtcgttgtagttataaaaggtggcatttggcgcgccctgcgctctggagagagcggcgggagcgatgatggagaaaagaagggcggctatgccgacgcagtagagaacgatctcttctctgcggctgaagctcctgcggctgagatagtacccgccgacaaaataaatggtgaagccgagcgggaaaaagcaataggagtacatgatgaccgtgtggatgacggtgcttgcctcatgcgaaacgaaggaggtgaacagggcaagttgggggagaagaaaggtgaaaagaaacgcaagcagcagaaagtagcgcatgagcgtttcattctgtacgatgggccgcagcagcgggatgagcagatacagccccacgatcatgtagagaaaccagaggtgataatgccctgtgataagctgcgaaagcacgaccgaaagcggcgcgtgacgaaagacaaggtcgatgagcgcgtagcagcccgaccagaagagaaagaccgtggcgatacgcgcgacgttctttttgagaatggaggagatgctgacatcgcgcccgagaaacagcgcgccgctgatcatcacaaagatggggaccgaccatttgcccgcagtgcagtagagattgaaggcgaaccacgcgcgcgaattgacatcgacatccgcccaatgcattgcggaaagatgcactgcaacaacgacaaagatcgcaacgatgcgcagaacgtcgaaatagatcacgcgccttggcgcgggattctttgctggcatactcagctctccttttccgcgtcctcaccgagcggcgcatcctgcgcatcgtcagcggcaggcgcagcctgcgcgctctccgcgcaagagagcgcctcggcgcggccttcttcgcgcgcctgctttacggcctcctcgcgggtcttttccgccttggcgcgctccttttcgaccatgtgctgagcgtgcttattttgcagcttgaacaccagccgcagcacgagcacgagcaccacgatcgcaaggccgagccagctccagaacttgagctcgaagagcgtcttgaccgtccagtacttcgcctgcatgccgaggaagcagaacaggatcgacacggccagcgccgcgccgaacagcagcacccacagcaccgacttgacggcgctgtgcttgcgcacgcgcaggtgcgcgatcaaaaacagcaggctcagcagaaaaaacgcagggaactgcgcaaataaaatttccctcagatccattggttacctcacagtgcgcatttgccgcgcttcaagtattcgcccatcttgccgccgacgaccttgccgccgtccacctgcagctgaccgcgcaggtagaccttcgacacgccgccattcgtgcggaagccctcgaacggcgtgtagcccgccttggagagcatgtccgcgccgtggagcacatgacttgcgccgggatcatagacgacgatatcggcgtcgctgcccgcggcgatgacgcccttgcgggggtagagaccgtagagcttggcgggattttcgctcagcgcgcggcagacgccgccgagcgagagcttgttttcattgatggccacagtgtagacgacctcgccacgcgtttcgacgccgggaagaccgccggggatattcgtaaagtcgtcgcggcccatgtccttctgctcgagcgtgaacgagcagtggtcggtcgagatggtctgcacctcgccgcggcgcagcgccttccagagcgcttcactgtcttcctgcgagcggatcggcggcgcgcagacatagcgcgcggcggaggaaaagtcgggatcgtagtaaacgccgtcgtcgagcgccaaatactgcgggcaggtctcgacatacacggtctgtccgcggcggcgcgccgcggcgatctcgtcaagagaagcacggttcgtcgtgtggacgatgatgacgggcgcgtcggccgcctgcgcgatgcgcagcagacgcgaaacagcctcggcctccaaatagtcggggcgggagatcgggtgcgatacgacgtccgcgcccaggccgctcgccttgagttcggcgatgcgcgcgtcgatgacgcccgcgttctcgcagtggacgcccgcgatgccgccgcggaccttgagcgctttcagcgcgcggtagaccgcaccgtcgccgatcatcatggcggggtaggtgaggtacatcttgaaagacgtgataccggcgtcgaacatcgcgtcgagctcagactcgatgctctcgttccattcgtcgatggtcatatggaagccgtagtcgcagtagcacttgccgtcggcctttttatgccagagatcaagcccataggcaagggattcccctttattggggcaggcaaagtcgatgaccgtcgtcgtgccgccgcggatggcgcttttgctgccgctttcaaagtcgtcggccgtcgtggtgctgcacacatcgagatcgaagtgcgtgtgcgcgtcgataaagccggggaagagcatgcagcccgtcacgtcgacgacctcgctctgcgcggcgagctcgggcgggatgtggccgagcatttcgaccttttccccgtcgatgagcacgtcggcgcggcggcagccgcggccgctgacgacatagccgcctcgaagcagtgttttcatggaagaagcctccttatctgagagaaaaaattccgtaccaaattgacaaaagcatagcatactttttgcccaatttccatagagtttggaaaaaatgtgagaagcgccaagatttttggcgcaaattcggaacaatgccgtattgagaaagtagcagacatacgatacaataaaatcataccacattccgcttttatttgtacaaaaagcgaacttttggcgcgcagaccaactgagagatgtgaaaagaagctgtgtgtcacgaagagcagacagagaaaaagcggagtgaaaaaattgaggaggaaaacactatgcgcaagttcctatccgtcctgctcgcaatggcgatggttctcagcctgactgtgaccggctttgcgatcgaggacacggcaactacaagagagcccgaagtcatgaccgaagaagcgacgatggcgggcaagaccgtgatcctgcacacaaacgatgtgcacggcgcgatcgaaggctatgcctacatcaccgcgctcaaggccgactacgaggccaagggcgccgaggtcatcctcgttgatgcgggcgactacagtcagggcgaagtctatgtcagcgacaccaaaggcctcgatgccgtcgaaatgatgaacgtcacgggctacgacgtcgtcaccctcggcaaccacgagttcgactacggttacgcacagctcaaggagaacatgaccaaggcggacttcaagatcctctgcgcgaatgtctacggtgaggacggcacccccatcttcgatgcgaactacacctacaccaccaagtccggcgtgaagatcggcttcttcggcatggagacgcccgaagcgcagaccaaggccaaccccgcgctcatcaagggtctcaagttcgacaccgacctcaaggcagtcgccgaaaagcagcttgaagcgctcaaggatgacgatgtcgtcattgcgctttcccacctcggtgtggatgattcttccaagccctacacctcctatgacctctacaatgcggccaaaggtatcgacttcatcatcgacggtcactcccacagtgtgatggctaagggcaagaacggcgagcccatccagtccaccggtacgaagttcgccaatatcggcgtgattgtcatcgacgacgccaccaagaagatcgagagcaactccctctacgagatcaaggaagacaccgccaaggacgcggccgttgccgctgccgcgcagaagatcatcgaccgcatcgacaaggagtacggcgcggtcttcgccaagagcaaagtggagctcaatggcgcgaaggcccccaacggcaaccgcgacggtgagaccaacaacggcgatctcatcaccgatgcaatgctctggaaggtcatgcagaacaaggaaggcctgaccgtgaatgaagaccatgtggtcgccatcaccaacggcggcggtatccgcgcggccatcaaggtcggcgatgtcaccaagaaggatatcaagactgttctcccgttcggcaacaccatcgaagtgatttatgtcaccggcactgaactgctcgaggcactcgaagcctccacgttctgcgtgcctgagtccatcggcggcttcccacaggtcagcggcatcagttacaccatttccaccggcgctgtctatgacgcgaatgccgagacctatcccgcttccacctactacggtccaaagtccatcaaccgtgtgaccatcaacagcatcaacggcaaggagttcaaggcgaatgacacctatgcggtcgttaccaacaacttctgcgccgagggcggcgacacctactacgcttttgcggcggcgacttccaagtttgataccggtgtgacgcttgatatggcagtgatggattacatcaccaaggagctcaagggcgtcatcggcgagcagtatgccgcgcctcagggccgcattctgatgaacccgttcaaggatgtcaaggtttcctcctggttcggcaagtatgtcatcgacctctacaatgacggcatcatcaacggcacctccgccaccacctatgcgcccaacgacaccctgacctgggctgccgcgctcaagctcctgcttgtcagcaacggcgatctcaaggctgcggacgccaccggcgccgactggagcaagaacgccatcgccaaggctgctgagctgggcctcgttgccgccgatctcgacggtgcgaaggccatctcccgtctcgagttctgccaggtcgctgccaagctcaacaagcttgccgagtccaagaccgagagcaagttcaccgactgcgccgacggttacgtgatggcgctcgtcgacgcgaaggtcatcagcggtatgaccgagaccaccttcgagcctgccgcgtccctgacccgcgcgcagatcgccaagatcctctatcagctgaacctgatcgagaagtaaggcgaagcacaaaacaacgaaaagagcgctgcttcaagcagcgctcttttttgcttccaacagggaagagggagccggggcatcgccccggctccctcgtttttcgttttgcttacaggtagagatagctgtacttatcgcgcacggtgaggatgagtgcctccagctcaacgggaagatcgttgtcgcaggatgctaagtcatattcctttacaccgtcctcgtagcgcaggcggatcttgtcgtcctcttcgaagagcacgccgtagttctcgctctcgtccatgtcctcgcgcgtatcaaaaagggtgaacttatcgtggcagggctcgcttgcgtaggggcagaactgcgtgcagttgccgcattcgttgcacatcttgtcgacgtggacgatctcgtgcgagccgtcggacatcttgatgacaacgttcgcgcggttcgggcaggaatcgacgcagttttcacacacggtggagcactgtaagcagcgctcgccgtcgcagacacatttgctcgccatggcgagcacgcccttcttgctctgcgcgtcgaactcggtcacatcggcctcggcggggatgtcgtaaacgtgcgggtggccgacgacgatctcggcaaagcgtgtggcatcggcaatgccctcgaccacggtagcggggccgcggtgcgcgtcgcccgcgcagtacacgccggggacgttcgtctcgaacgcgggacccttgcgttccatctcgatgccgttcgcggccatgagatcggcgtcgacctgctcgccgacggcggagatgaccatgtcgcaggggatggtgaactgctcgccggacttgacggggctgcggcggccggtctcgtcgggctcgccgaggatcatcttgtcgcacagcagcttgccgcggctctgtttgacgggcgcggccagctcgacaaactctacgccgtccgcgatggcgagctgtaactcatgctcatcggcgggcatgaacttcttcgtgcggcggtagaggatggtcgcatgcgcacccatgcgctttgcaacgcgcgcggcgtccatggcggtgttgcccgcgccgacaacgacgatgttgccgctcaggcagggcttgacctgctttttcatgcgcttcatccactcgatgacgccctgcacgttgccttcaatgtcgagcttgccgggcttccacgcgccggtggccatcaggatgtgcgtgtagcccatcttcttgagctgttcgacggacggagcaggcttgccgagcttgacctcgacgccgtagcgctccatgagcgcgacgtccttgtcgatggcctcgtcgctgatgcggaaggcggggatgacgtagcgcggcacgccgccgagcttgcgctcgcgctcgaagatcgtggtgggaacaccctcgcggccaaggaagtacgccgcggcgataccggtcgggccgccgccgacgatggcaacctttttatcctcgaccggctcaggcatacggagggaggccatcaaggtgttgtagcccttttccgcggcgagaagcttcgtctcgcgaatgtggacagattcctcatagaagttgcgagagcacttgccctggcagcggtgcgcgcagatggtgccggtgataaacggcagggcgttcttctcggtgatgaggcggagcgccgggccgtagagccccttgcggcagagctcaagatattcggggatgtcctgctcgatggggcagccgcccttgcagggcgcctcgaagcagtcgagaagaggaacctgctctttgctcttgcgggaaggcagcggcttgatgggctttaagtggtggaagtcgtgcagggcggaggctgcgaggtcggagatcgcggcagggtcgttgccggcaaatgcacggtagggcatatcctcgaccttttcgaccatctggtgcaggcggttgtagccgccgggcttcaagatggtggtggcaacggtgatgggccagatgccggcggcaaagagcttgtcacagttgaagtagtccgcgccgcctgcgaacgaaatgcgcatcttgccgccaaactggcgggagatgcgattgcacatctcaatcgtcagcgggaagaggctgcggccggacatgtacatttcctcgttgggaagctcgccgcgcgtcgtgtcgacggggaaggtgttggaaagcttgagaccgaactcgaggccctgcttatccgcgagcttttgcagccgctcgaacatcggaacggcgtcctcccactggaggtcctcgttgaagtggtgctcgtcgaagacaatgtagtcatagcccatggaatcgaggatgctgcgcgcggtcttgtagccgaggatggtcggattgcacttgacgaaggtgtgcagatgcttttccttgagaagatagcttgcgatgcgctcgatctcctgcggcgggcagccgtggagcgtggagagcgtaacggagcgggaaacattgggggagatcgaggcgatgaagtccttttcctcggggaagagctcggtcaggacttttttacattccttgaactgcgcggtcttgcccgcgtccatcatgttgttgatataggtgttgaccttgcggcccttgatgccctcgaggtcatagccgacggacatgttgaagacgaacccgtcgggatcgccgaagccgtagactttgctcatgaccttgagcgcgcaccaggccttgatgtactcatcctgcgcctgctgcacggtcagttcggtcgaccactcctggttgtagccctcgtcagcggcgagaatgcaagggcgggggacgcaggcggcaagctccgcgccgtccatcttctggacggtcttgacctcgaaaaagcgcgcgccggcggcataggccgcgatgatattctgcgcaagctggctgttggggccggcggcggggccaaacggtgtttcgatgcgctcgccgaagatgggcaggctcttgccgctcgcgtgatagtgcttatgaacgccaaagacgtcgccgcactgggcgtattcggtcgtgacccagttcatcagagagtcgaacggaatgggatacattttttcagacattgttttttcctcccgcttgcttaataggttctgtgattcagctcgccccagagtttctttgccgcttcaagaatgtgcgcattttcggcttcttcgtcgatgccgacgagctcgcggtcgagcatgagagtcttgccggcggcgatggtggtttggcactggcggcccgtcatgccgaagatcatgtggccgtcgatattctcgtcggagaacggggtgaacggcttatagtccatgacgatgatgtccgctgcggcaccgggcttcagcacgccgagcgtgtcggggaagtatttttcaccgatctttgcgttgttcttgaagagcatatccgtgacctcgcaccagccgacgttcggcaggcagttctggctgcgctgggagcagagggcgaccttgagggactcgagcatatcgttcgtgtaggcgtctgtgcccatgccgagaagaatgccgcgcttgtggagttggaggacggggcagatgccgatggcgttgcccatgttggattccggattgttcacgaccatcgtgccggtctccttgatgatctccatttcggcggtgttgacgtggatgcagtggccgaggatggtcttggggccgagaatgccgtgatcctgcaagcgctggacggggcggcggccatagttctggagggagtcgtacacatcgttcatgccctcggacacgtggatgtgatagcccgtgcggccgttgttggccgcgaccatgcggtcgaaggtcttatcggagatcgtgaacagcgcgtggccgccgaacattgccgcgagcatcgggtccttattcttttcgcattcggtgataaaatcggcgttctcctgaatggcctgtaagcacttctcctcgccgtcgcggtctgagacctcatagcacaggcaggagcgaaggcccaggcgcttgctctcctcggcaatcgtgtggagcgtgccggggatctcgccgtaagaggcatggtggtcgaaaatcgtcgtcacgccctgcttgatggagtccatgtacagcgcggtggcggacgcccgcgtgccgtccatcatcagatggcggtcgatggcccaccacgtgccgtcgaggacttcgtagaagttcgtcggattgttgccgacgatggaaaggccgcgggcgagggcggagtagatgtgcgtgtgcgcgttgatgaacgcgggcatgatgacgccgcctttggcgtcgatgatctcggcgtcgggatacttggcgcgaagcatcgcttcctcgccgacttcgacgatcttcgtgccctcgaaggcgacggcgccgtgctcataatagccctgtgcatctgcgttgcgggtgatgagacgaccgttggtgacaagtttcataagtttgctcctcctttttcttttgccgtttccccgccgcgaaagcggcaccgcaaggggaaagaaaaagcgctcctcacacagaccgtatcatctccccaaaaggggagaccgtacagcccgtgcgcgaagcactacgttgcagctaccaaacggtaatttagtttgtaaaaatattttacaggaaacgcgaacaaaatgcacgtttttttcgtctaaactgacgtagaaaataaaaacgtaattttgtgcaatccgtggaaagataaaaagatgccccgcagcggccgtgtaagccccgtcaaaacctgcaccattctggacaggtgggtcgcctctgtccggctttattgcttccaacgtccagccgcagacggcagccgggaggcctgcaaatcaccggagcgtaccggcgtcccttatgacgaaatgtgggtttaaaaagaacttatcacgcaccccgcagggcatgttcagtttatctcagttttcggaaaaaatccgtcgcaatcgaagttttactcttcgtcggaaaggatctgctccatgaagaggtcgtagaccttgtcgatctcctcttcgtcgtcaatggtgacaaggaactcctcaccgttttccatctggcttttgaggatcatgagaccgtattcctcttcgttttcctcgtcctcgctgtcctcttcgaccacggggaagaaggccatatacgtcgtgccgttatgctcgagcgcgtcgacgtattccagctctatatcgttgccctcgtcatcagtcagcgtgacgaaattggggccgaactcatcgttcatgggggaacacctcctgaaagtttgtgttcgcattataccgcaccttgcggcaaaatgcaagacaagatacgtaccacttgacagccgtgctatactgtattctgtatcactattgaaaatcggctatgcgcgcttgcgcatatttctatcgcaaaggaggaggcgctttatggaagaaaaccgcgcagaaaaccagacgccccaaagacagcacacccagcaccccacgcatcaggcgcacaaaaagaaaaaatccggcacggccaagcgggtcatcggcaccatcttagccatcggactcacgacctgcctgatgtttttcgccatcttcatggtctacgtgcacacgtcgctcgatctggacgtcgatatttcggcctacacgctcaagcagagctcgacagtctactatcaggacaaggcgagcggggagtgggtggagctgacgaagctccacggcgtagagaaccgcacgctcgtcagcatcgacgacatccccaagcatgtgcaggaggcgctcatctccattgaggacgagcgctttcaaagccaccacggcgtggactggaagagcacggccaaggccattctcggcaagctcaccggcacgtcgacgcgcggcggctcgacgatcacccagcaggtcgtgaagaacatgaccggcgacaacgaggtgactatcaagcgcaaggtgacagagatcttccgtgcgctgcgcctcgagaagaactactcgaaagacgaaattctcgagacgtacctgaacctcgtctacttcggcaacggctgcaacggtattgaggccgcggcggagggctacttcggcaagaccgttggtgagctgagcatcgcggaggcggcgtccatcgtcggcatcacgcagttcccctataaatatgatccgtcgcgcggcgactggtaccgcgagcagaacaaggaacgtcagctcaccgttctttataagatgcacgagcttggcaagatcagcgacgaagagtacgagcaggcaaaggtcgagccgctcgtcttctcctgggacccgggttttgttccttctgcgggggttgcaagcagggtggataccgcctcgagcacggagtatgactcctactttgttgagcgcatgttcaacgacatcgtcgccgatatgcacgaacagctcggatatgatgagtcggtcgcaaaggatctgctctacaccggcggctactccatctactgcacggtcgatcccaaagtgcagtcgatcgtggagagcgtttacgccgaccgcaataacctgaactacacctcgtccaagggcgagctgctccagtccggcgcgacgatcatcgacaacacgacgggcgacatcgtcgccgttgcgggccgcgtgggcgagcgcgagggccggttcctgctcgactattcgaccgttgtgcgtcagtgcggttctgccatcaagcccttgagcgtttatgcgcccgcgctggacgccggcgtcatcacgcccgcgagcgtcatcgacgactatcccgttgaaatgctcggcggcagtatttggccggtgaacgcctactcgggctaccgcagcattatgacgctgcaagacgccattcgcaattcgtccaaccccacggcagtgcgcacggccatcaagctgacgctgcccgcatcgtatgcgtttatgaccgaaaacttaagcttcacgacgctgacgaacgacgatatgaccgcggcgggcgcgctcgcactcggcggcctttccaagggcgtgaccacgcgcgagatggccgcggcctacgcaacatttgcccgcggcggcgtttacaccacgccgagaacgtataccgaggtgcttgaccacaacggcaacgtcatccttgaaaataagaccgagtcccacgttgcgatgaaggagagcaccgcttacgcgatgaacgagctcctgaaaaacgtcgtgcgcaacggtacgggtacgggcgcgaacttctccggcatgaccatcgccggtaagaccggttcgaccaacagcaacaacgaccgttacttcgtcggctatacgccgtattacacggcagcggtctgggtcggctacgacacgccgacgcgcatcgtggcgagcggcaaccccgcggccacgctgtggaagacgtttatgagcaaggtccacgcgggccttccgaacaaggactttgaagtcagcagcgccgacatggtcagcgtgaccgtctgcacgcagacgggacttctggcctcggccggctgtccctcgcagactgtcaaggtcgcaaaggactatgcgccctcgctgagctgcgacggacacatcagcgtaaccgtctgcgccgattccggcatgctcgcctccgactactgcccgaatgttacgacggcctatgtgctcgatctgagccagccgaacgtcagcagcggttggggctacaagcgcgagcttctcacgacgccgctgagcgccgcgcttcaggcaacgtatcaggcacagctcgaagaagggctcatttcgtcgatccctgcaggcgaaccggtgcgcacgaacagcggcacagtgcagctatacagcgatctgatgtacagcggcatgtgcacgacgcacacaacgccgctggagcccacgccggacccggatgcaccggatgacggcagcggcacgacgccggacggtgatgccaccactggcggcgacagcggcacacagacgccgtctgacaacaccggcacagcaggagacagcgcatccggcgatgtcggagacaacggccagttcctcaactggctgctcaacaacggcggcacaggccggtaaaaagcaataaaaaagagaacggttttcaccgttctcttttttatgcggcagcttccgcttttgcgtttcgaatctgcgcgaacagcagcaggaggaaggggaagagtaccatccctgccacgccgaacgtgcagtagccgaggtacatcgcaaaaagcgacgcgaccggcggcagccccgcctgcgcggagagaagcttgggctcgagcgtgttgcgcgtgatgagcgtgcagaggtagagcgcgaggagcacgatggccttgggcgggaagccgaacagcagcgtgaagaccgcccacggcacgagcgccgtgcccgtgccgaagaccggcagcgcgtcgagcagtgtgatgagaaaggcgagcagcagggaatagctctggcgcatgaggagaaagccgataagaagctctgaaaacgtgatgagcgacagcgttgcctgcgcgcgcagccaccgcgcaagcgagcgcattacgccgccgcgaaagagccgcagctttgccatcgcttcttccggcacggcgtgttcgagtgccgcgcagagctcggggtacgacgcggaggtgaagaagatcgcaagcacgcccgtcgcgatggcgagcacgccgcccggcagcgccgcggcggcagagccgagccacgccatcgcgcgcgaagacagcgagcgcagcaggctgtccgcgtccgtgacggccctgaaaagctgctcgtgcagatagccgctgagccattcgggactcgacgcgctgaactgctccaatcgggagagcagatcgtccgctgcggcgggaatcgcgtcgaaaaacgcgggcgcggcggcgagcagcgcgttcgtctgagaaagcagcgtagaccacaggagcgacagcagcccgccgagcagaaacagcagcgtcagcgtcaggatcagcgcggaaaagccacgttgaaagtgaaatttccgccgcagatacaaaacgaccggttccagcagcgccgcgacgagcagcgcgagcagaaacggcaaacaccacggcagcacatagcgaaagcagacataaaagagcgatacgcccatgaaaagcgcgagcgataaagtgaggaagcgtctcagccgtttttcagtcaaattttgcagacctcccatcgaaaaaagtgttgcaatatgcgttaggatatgctaaaatcctgccatataaagacagatgaccgcggaggagaaacattatggcgcctgcaacgaaattttatttggtctcggcagaggcccttccggaaatttttatcaaggtggcggaggcgaagcgcatgctccagtccggcgaggtgcgcaccgcgggcgacgccgcccgcgccgtcggcatcagccgcagcgcattttataagtaccgcgatgcggtgcgccccttcaacgacatgaagaccggccgcatcatcacgttctacacgatgctcaagaacaaccccggcgtattgtccgacgtcctttctatttttgccggttcgggcgcgaatattctgaccatcaaccagagtattcccaccaacggctgtgccgcggtgacgatctcggctgagacgtccgagatgcaggagtcgatcgaggagatgatggcgcgggcgctcgcgctcgatggcgtggtgcgcttcgatatcctcgcggcctgagtcacgcgggcttgtacaagttcatacgatggattggcagcggctgagatgagcgctgtcaatccattttttgttggaagtggttcttatgagcctgatcgtacagaaattcggtggcagctccgtgcgcgactatgcgcatcttctgcgcatggcgcgcatcgtcaaatcgcgggtggacgaaggtgacgacgtggtcgtcgttctctccgcgcagggcgacacgacggacggcctgctgcaaaaggcaaaggagatcagcgagcagccttcgccgcgcgagctcgacatgctgctctccgcgggcgagcagatgagcgccgcgctcggcgcgatgacgctgcgttccatcggcgtggaggcggtatccctctgcgcatggcagatccccatcgaaacggacggtacacatgggaacgcggagatcgaactgatcgacaccgcgcgtatccggaaggagctggccgagggccgcgttgtggtcgcggcgggctttcagggcgtcgacgagcggggcgacatcacgacgctcgggcgcggcggctcggacacgagcgcagtggcgctcgccgcggcgttgaaggccgacaagctcatcatttataccgatgtggacggcattttttcatctgacccgcgcatctgcaagaacgctgtgcggcgcgaggtgatctcgtatgacgacatgctgctgctcgcacagaagggcgcacaggtgcttcacgaccgcagcgtggcacttgcgcaggcgggcggcgttcccatcaccgtgcggtcgtgcagggaaggcggcaatggcagcatcgtttgcgaaacggatgaagacgcaagcgtcgtcggcgtgacgcagaaaaagagcgggcggagccgccttgcggccatcacggcggtcggcggcgcgctgccgagcattgagaaagagaagatagccgtcacggcgctcgaacgggcggagatcaccgtcttcgccgttgcggcgggggagcggttcatgagcttttacgtcctgcgcgacgacgcagagcgcgccttgcagctcgtgcacgacgcgctgatcgccgcgaaagaatgaaaaaagacccgttggagcatccaacgggtcttgccttttgcaagctgcttattcttcggcgtagcgctttttcgccttttcgatcttggtcgaatagcggtcctcttcagagaagatgcagccgcagtatttctgcatgtagaggcccatctcgcgcgccttggcctgcccctcgcgaaaaccggggcggaagtcacggtagtagaattcgacgccgtactgtttgcccatcgtctcgcccacggcctttaagagctcgtggttctgatacggagagatgagcagggacgatgtgaacgcgtcgtagccgtggtcggcggcgtatttggccgccgtgccgaggcggatggtgtagcagtgcgcgcagcggtggtcgatatctgcactcacggcgcggacaaagtcgcgcaggccgtaatcctctaaaatatgcacttctacatgctctttttccccgtattcgagcagcgtgcggcggcgcgcgtcatactccgtccaggggtgaatgttcgggttgaaccagagtgacgtgggctcgatcccgtcggcgcgcagcgtgtccacgcagtagaccgagcagggggcgcagcaggagtgcagcagcagtttatccatcaaaaaagaccagctttccttgtgtcgtttctgccagcataccacaagcgcgcggcaaagtccacgggaaaagaaaattaagcgaatggcgcaggatcgttcacgatttatacattgactattcaatcaaatgcgtagtataatacattgattattatgaacaagtatgcccatgcggcaaaggagaaaatgtatgtggatcgcggacggttgggaagattatgagctgctggactgcggcggcggagaaaagctcgaacgctggggaaagcaaattctggtgcggcctgaccctcaggcgatctgggagacgccgcgcacgaaccgcggctggcgcaacgcgcagggccgctattaccgctcgtcctcgggcggcggacattgggacaaggaaaagctgcccgagagctggacggtaaattacaaggatctcaaattccaggtcaagcccatgaattttaagcacacgggcctgttccccgagcaggccgtcaactgggattttgcgcgcgagaagatcaaaaacgcgggccggcccatccgcgtgctgaacctcttcgcctacaccggcggcgcgacggtcgcgtgcgcggcggcaggcgctcaggtttgccacgtggatgcggcaaagggcatggtcaactgggcgcgcgagaacgcgcgtgtcagcggcctttccgatgcgccggtgcgctggatcatcgacgactgcgcgaaatttgtcgagcgtgagatccgccgcggcaaggtgtatgacgccatcatcatggacccgccgagctacggccgcggccccgggggagaggtctggaagttggaggacaatcttttcccgttcgtgaagctctgcgcgcaggtcttatcggacaagccgctttttgtcatcatcaactcgtatacgacggggctcgctccctcggtgctcggctacatgctgcacctgctcgttgcggaaaagtacggcggcaaggtcacgtgggacgagctgggcctgcccgtgacggagacggggctcgcgctgccctgcggcgcgacgggccgctggttctcggaataaaggaatccgccgctttgcggcgatgaatccccgaaagctctttcgggacaacgattaaggaacgcaacttttatggaaatgatcaagacccaagacctggcctttacctatccgggcacggaagaccaggtgaacacccgcgcgctgcgcggggtggatgtgaccatcgagcgcggcagctttgtcgtgatcctcggccacaacggcagcggaaaatcgacgcttgccaaaaccttcaacgcagtcttgctgccaagcggcggcaaggtctatgtcgagggcatggacacgatggacgaatcgctcctgcttgaaattcgcaggcgcgtgggcatggtgttccagaaccctgacaaccagatcgtggcgaatgtcgtcgaagaggacgtcgcattcgcaccggagaatttgggcgtgccgagcgccgagatccgaaagcgcgtggacgacgcgctcgaggccgtcggcatgacgcagttcgtcaagcacgcgccgcacctgctctccggcggacagaagcagcgcattgccatcgcgggcgtgctggcgatgaagcccgagtgcatcgtgctcgacgaggcgaccgccatgctcgaccccatcggccggcgcgaggtgctcgcggccgtcgaaaagctcaaccgcgagcagggcatcacggtcgtcctcatcacccaccacatgaacgaagccgagcacgctgaccgcgtcatcgtgatgaacgacggccttgtcgtcatggacggcaagccgcgcgaggtttttacccgcaaaaaagagctcgaggacatcggccttgccgtgccggacacggtctcactgctcttttccctgcgcgaggcgggcatggacgtccccgtggatgccatcaccgtagaggaatgcgcagacgccattgcgaaaaattttacctaagaggactgtaaccttggaagagatcattcgtgtagaaaacctgacgcacacctacggggagggcacgccgttctgccgcagtgcggtgcaggatatgtcgctcgcgatctatcgcggcgaatttttgggcatcatcggccacacgggcagcggcaagtcgacgctgatccagcacttgaacggcctgctcaagccgacctccggccggatacttctcggtggagaggacatctggtcggacccgaagaaaattcgggacgtaagattccgcgtgggcctcgtgttccagtatccggaataccagctctttgaagagaccgtttaccgcgatatcgcgttcggcccgacgaacatgggcctatccaaagacgagatcgaccgccgcgtgcgcgaatccgcgcactttgcggggcttaccgacgatctgctggaaaaatcgccgttcgccctctccggcggacagaagcgccgcgtggccatcgcgggcgttattgcgatggagcccgaggtgctcgtgctcgacgagccgagcgcgggccttgacccgcagggcagggaagagctgctttcaaacatccgcgaattccaccgcgctcgcggcacgaccgtcgtgctcgtgagccacagcatggaggagatcgcgaaaaacgtcgaccgcatcgttgtcctgtcggacagccacgtgctcatgagcggcacgccgcgcgaggtcttcgcccgcggcgacgagctgatgagcgcgggccttgacgtgccgcaggtcacgcgcgtcgcgatggcgctgcgcgataagggcattgccatcaaccccgctgtttacaccgtcgatgagctcagcaaagagcttgtcgcgctcaagagagggggcggcaaaaaatgctgaaggatatcacgctcggccagtttttcccgggcgacacgctcgcccataagctcgacccgcgcacgaagctcctcgtcacggtgctctacgtcgtggcgctctttacggcgaagagctacattgcctacggccttctcattctgacgctgattgtcgccgtgcgcatctcgcgcgtgggcgcgaaggcgcttttcaagggattaaagccggtgctgttcattatcgcgttcacggcgcttttgaacctcttttacacgcccggcacggagctgtgccatttctggatcttccgtatcacgatcgagggcgtgcgcgccgccatcacgatgatgctgcgcatcacgcttttgatcatgggaacgttcctgctcacgtatacgacctctcccatccgcctgacggacggtctggagagcctgctgggcccgctcaagaagatcaaggtccccgtgcatgagctcgcgatgatgatgtcgatcgcgcttcgcttcatcccgacgctcatcgaggagacggataagatcatgtccgcgcagaaggcgcgcggcgccgactttgagactggcagcctcatgcagcgcgccaaggcgctcgtgccgctgctcgtgccgctgtttgtcagcgcgttccgccgcgccgacgagctggcgacggccatggaatgccgctgctaccacggcgacgaaggccgcacgaagctcaatgtgctgcactaccagacgcgcgactatctggtgctcggctattatgccgtgctcgtggccgcggtcatcgcgctgcgataagaagaaaggacgcttttatgcgaaacatcgccctcaagctcatgtataacggcacggcctatcacggctggcaggtgcagaagacggtctcaagcgtctgcgagacgatggaaaagggcctctcgaaggtctgcggcgggaacgtcaagctcgtcggctgcggccgcacggacgcgggcgtgcacgccgagcgatatatcgccaatttccataccgagtcgcgcattccggtcgagcgcctgccgtttgccatcaatacgcacacgccggaggatatcgtcgtgcgcgaagcgcttgaggtggcggaggatttcaacgcgatcctctcgtgtcaaaaaaaggaatacacctaccgcatttataattcccgcatcaaaaacccgttctatgtcaacagggcgtacttttaccccaagcacctcgacgaagaggtgatggaccgcgcggcgcgcgcctttgagggcacgcacgattttcgcgccgtccgctctgtcggcacggagacgaagaccaccgtgcgcaccgtgcactactgccgcgtgtcgcgctcgggtgatcttttggaactcaaggtctgcgcggacgggttcctgtataacatggtacgggcgatcaccggcacggtgctctacgccgccgaggggaagctcacgccagaggacatccccgagatcctggcctccggcgaccgctcgctcgccggccccacggtgccgccgggcggactgtacatgacgagactttggtatgaggatgaacggctcaatgaatgatctcaaagaggaaaagggaacacgcgaggagctgaggcgctcgcaggcggccccgcgccgctccggcggcgggctcaagcgggcgctgatggtgattctggcgcttgtggtcgtgctggccgtggtcgtcgccgcggcgtggaaggacctgagcagccttgacagtgtgcgccgccttttctcctacaataaggtcacgcaggatgagcagggcaaggtggagatgtactcgttcagcaacgaccgcagcaacacctttgcgctgctcggcgaccatctgatcgtcgcttcgacgacgggcgtgtcgatctacagcagcagcggcagcgtggtggacagcatgagtgtgaagctcacgaatcccgccatcgctgtcggcggccagaccgccgcggtctatgatatcggcgggcagacgcttcttatttactctgcaagcggccttgtgcgcgatatgagcggcgagtgcagcggcaatatcctgtcggtcagcgtcaattcctcggactatctggcgctcaacgccgaaaagagcggctacaagtccgctgttacggtgtacgacgcttcgggcgagaagacgtttgccttcaactcctcggagcactatgttatcgacgcggtcgtcatgcgcgactgcaagcgcatggcggcggtgacgctcggcgagtcggatggcacattcgccgacacggtgagcatctattccctcggcagcgataaggcggactcggtcaacacactcacgggctcgctcctgctatcgctcgacagcgtggccggtacgctctcgtgcctgacggacgagagcttgacgctcttttcatcggacggtacgctttccggcagctatcgctacgaatacccgtatctgcgcggttcgagcatgggcggtgacaactatgcggcgctgctgctgagccgctaccgctcgggcagcaccatgaagctcgtgaccgtctcgtctgacggtacagagatggcaagccttgacagcagccaggaggtcctgtcgatgtccgcggcgggaaagtatatcgccgtgctgtacagcgacagtctggtgctctacacgccgcagctgcaggaatacgcgcggctggacggcacggagtacgcgcgctctgtcatcatgcgcgaggatggtacggcggtgctgatcggctcgtcgtccgcctggctttatattccgtaatttctgtaaaacgctaaaaatgttacaatttatgacttgaaaggagcgcgggaaacgtgaataatggtcttatgatcgatgcagtcttcgcgctcgtgctcatattaagcgtcgtgttcggcgccaagcgggggctgttccgcagctttatggcgctggcggcgatcgtgctcgcgctgatcggagcgtcgctcctgaccgacgctttgaccgagcccgtgaccgacatgctgatgccgcgccttgaaaagagcgtggaggagtggtttgataccgaatcgcagacaccgcagggggatgtcccgcaaatcgagggggagaccccggcggagagcgacgcctcgggtgaaacgccaaacggcgacgccgcgcaggacgcggaaaacgttcggcaggacgattcgccgctcgcggtgacaggccttctcaaaaagctgctgcgcttcgatttcgacggcgcggtgcgtcagtcgcttcgaaatgccgcgcgcgacgcagcgcttgccgccgtaaggacgctgctcggcagcgtggtgaggacgctcgtgttcgtgctgtgctttttggtgctcacgctgctgctccgcttagtgacaggcggcattgacaaggtgttagacttgccagtgctgaacgcgctcaacaccatcggcggcggcgcgctgggcctgatcgagggcgcacttttgctgtttctcgtctgcgatgtcgcaccgaagctcggcatcagggcctttgccgactacgagggcacgtatctgttatcgttttttatgagccatactccgcgcgggcttgtcgccgcgctgttaccctgatctttaccccaaggaggaaatactatgcagccgcaactttgttccagatgtaaaaagaatatcgccgttgtgttcatcacccgtcaggaaaacgggcagaacgtcaacgaaggactttgcctcaagtgcgcgaaaaatctcggactgccgcaggtggacgagatgatgcgccgcatgggcatcacggatgaggaccttgacaatatctccaatgaaatgatgggcgccttcggcggcgcggaaaacctcgaaggtctgaccgacgccgatgatcccgacgccgacaacgaggacgaggacggcaagacagccacattcccgttcctgagccgctttttcggcggaaatcccgctgcgaacgacgcacaaaatggcggcgaggccgagcagacgcagagcccgcgcagcaacaagaaggtcgaaaaggggagcaagcacaagttcctcgactcctactgcatcaacctctcccagcgcgcacgcgacggcaagctcgacgcggtcgtcggccgcgaggaggagatcgaacgcgtcatccagattttgaaccgccgccagaagaacaacccctgcctgatcggtgagccgggtgtcggcaagacggccattgccgagggcctcgcccagcgcatcgtcgcgggtgacgtgccgttcaagctgagaagcaaggaggtctatcttcttgacctcaccgcgctcgtcgcgggtacgcagttccgtggccagttcgagagccgcatgaagggcctcatcgaggagatccgcaagatgggcaacgtcatccttgtcatcgacgaagtgcataacatcgtcggtgcgggcgacgccgagggcagcatgaacgccgccaacatcttgaagcctgcgctctcccgcggcgagatccaggtcatcggcgcgacgacgttcaccgagtaccgcaagcacatcgaaaaggataccgcgcttgagcgtcgtttccagccggtcacggtcaacgagccgaacatggaggacacgctcaaaattttgaagggtatcgcccactactacgagcagttccacggcgtcaaaattcccgagggcattctgcgtcaggcggtgctgctgtccgagcgctacattaccgaccgcttcctgcccgacaaagccatcgacctcatcgacgaggcatgctcggacctcaacctgcatgacaagaacatcaaccgccgcatggagttgcgccgcgagatcgaggattacgacaaggagcgcgagcttttgcagggcgcagaagaacccgacttcgagcggctggctgagctcaagagccttaccatcaaggcgcagaccgagctcgatgcgctctgcgcgcagggtgacccgcagctttcgatggacaaccttgcccgcgtgatcgagctgtggacgaagatccccgcctcccgcatccgcgaggacgagttccaccgcctgagtgagctcgacaagcgcctgaaagagcacattgtcggccaggacgaggccatcgaggccgtttccgccgccattcgccgcaaccgcgtgggcatttcgcccaagcataagcctgtgagcttcatctttgtcggccccacgggcgtcggcaagaccgagcttgtcaagcagcttgcgcaggatctcttcaattcgcccgacgcgctcatccgcctcgatatgtcggaattcatggaaaagcactcggtctcccgcatcgtcggctcgcctccgggctatgtcggctatgacgaggccggtcagctcaccgagaagatccgccgcaagccctacgccgtcattctcttcgacgagatcgaaaaggcgcatcccgacgtgatgaacgtcctgctgcaaattctcgatgacggtgaggtcaccgattcccacggccgcaaggtgaattttgaaaataccgttatcgtgatgacatccaacgcgggcagcgaacgcaaggagggcaccgttggctttggccacacggtgaacgagcagaaccgcgaccgcgcgatgaaggcgctcggtgagttcctgcgccccgaatttctgaaccgcgtggatgaggtcatctgcttcaaccgcctcgacgagcagaactttgccggcattgcccgcatcatgctcgatgagctgcaaaagagtcttgaggacaagggcctgcactttacgtgggacgagaatgttgagaactacctcgtcaagaagtcctactccgcgacctacggcgcgcgcaatctgcgccgcaccattcagaaagagctcgaagacgtcatggccgcgcagatcatcgactcctacgagcaccccgtcacgcagatccatgcgtcgatggaggacggcaagctcgtcgtccgcagcctgtaaaagaaaggggagggagaccatgttccatctgttccgcaaggacattgaaaagcactgcgcctactgcaagagcggatctgtcatcaacgaagggcaggtcatctgctcccgccgcggcgtggtcgactctgccgaccactgccgtcacttctgctacgatccgctcaagcgcgtgccgccgcgtccggccacgctgcgcgatcagtatacctccgaggatttttccctgtaaggccgggcagcgccccgaacaataaagaaagaaggccgatacccatgaacatttctcaggtttacgcagtctatttcagcgccaccggcaacaccagaaaagtgaccaccacgcttgcaaatgcccttgccgtcagcttcgacgtgccgctcgaggtgcgcgatttcacgctgcccgccgcacgcgaggaaagctatgagtttgccgcgggcgaccttgtcgtcttcggtatgccgacctatgcaggcaagcttccgaataagctgctcgagtttgtgaagtccggctttcacggaaacggcgcgctggctgtaccggtcgtgacgttcggcaaccgcagctttgataattcccttgccgagctctgtgcctgcctcgaaggggacggctttcacaccatcggcgcgggcgcctttgcctgccgccacgcctttaccgacgcgcttgccaacggcagacccgattccgacgatatggcggagcttgcaaagctcggctccgcggtcgtgggccgcatcgtgcggatgaccgagtatcccgcgcccgtcacggtcgacggtgacgccgacgcgccgtattaccgcccgctgggtctcgatggcgaaccgaaggtgtttctgaaggcgaagcccaagaccgagctcgacaagtgtatccactgcggtgtgtgcgcctcactctgcccgatgggctcgatcaatcccgatgatgtcaccgaggtcgtgggcgtgtgcatcaaatgccactcctgcgtgcgcaactgcccgatgggtgcgaagtatttcgacgatcccgcgttcctctcgcaccgcgcgatgctcgaacgcgactacacgcgcagagcggaggacaagatcttcacggcgtaagaaagtacataaaaaggctctgtttgggaatcccaaacggagcttttttcattcctgaatgacggaacgttgctgcattacaaacaaaatttgggaagggcaggaagcggggacagccacgcacgcatacgctatggagaaagcaccaattttgggagggatcttatgaaaccggtgtactttttcctcggcgcaaacagcgaagagggctttttctcgctctatgaccagcttttgggcggtcggctcgacgatctgatgattctgaaaggcggccccggctgcggcaagtcgaccttcatgcgccgcgtgggcgcggcgatggagcgcgcgggcgagcgcgtcgtgtacatcaactgctcgggcgaccccgattcactcgacggcgcgatctttttggaccggaatgccgccattgtggacggcaccagcccgcacgtgctcgaaccgacctacgcggtcgcgagcgagcgctatgtcgacctgacacgcttctacgatgtggacgcggccaaggcacgccgcgcggagatcatcgcgctgagcgacgagtatcgcgcgcactaccgcagtgcctaccgcatcctgcacgcgatgggtgaagtggaaagcgaacgccgcgtggcgatgcacgcgcagatggatttttcgaagctccgccgccgcaccgacggcattctcgcacgcgagctgcgcggcgacggaaccggcagcgggcgtgtcgaccgcgcgtttttgggcggtgtgacgcatcggggcgagatttgtcggttcgacaccgtcgaagccctctgcccgcgcatctatgccattatcgacagtgcggggctgggaaacgaaatgcttgagaccgtcgtgcaggcggcacaggcgaagcattttgacatcatcgcctgcccgaatccagaccggccgcgggagctccatcacgtattgatcccggaaaaagggctggcgtttatcacaacgaacgcgcgcaacccgtacggcgggaagccctaccgccgcctgcgtctcgacgcgatggcggaggagaagcttacgcgcgcgcagaaggcgaagctgcacttcacgcgccgcgtggaggcgtcacttttagatgaggcagtgggcgcgctgtcggatgccaagaaagcgcacgatgcgctggaatccgcataccacccctgcgtggattttgagggtgtcactgcgctcgcagagcgtgagatcaatagattattaaagcaatagtgctttacaggttcttgctgcctgaaggcagcaatgggattccctgcgcggcgcagggtgcggcaaaggggaccattctctcacgtgagagaatggccccctttagatccccaaagagaacgcaaggggccttgccccttgaccccgcacattggcagtcaggcacttgaagaactgctcagcctgcggattgcactgtggtgtacatggcttcgccatgaacccctgcgtttcgttgcatgctgcaaccgcgccttactatcgtgaggcgtgagtgacgttacctcggcggcggactgcctgccgaatgaggcattgttacgctcgccgcattgattagcattccggtagacggtgattactgcgcacttctataagatgggcagagcggcagcggatagtaggagcaagccaagtcgtatagcagaggccaacgcggcttcgccgcgctatgggcagtgcaatcggcaagcattgcagctcttcgagctgctcgcttgcaatgcgaatccctttctcttgggggtcaaagggggatattctctttccgtggaaagagaatatcccccttaatcgtccccctgcacggtgcagggaaaaccccgccctttcgggcgactttgattcattgtgccatatcggcacgaaaataaaccgtccgctccggcagcgataagatcagcgtatattcgctgcttttcccgcccgcggcgtcagtgtattccgtgatgccgacgagggcggtgccggtctcaccgtccagcgtaagatcatagaggacgtcgttcgcatcgtgctgggtgagggtgtatgtgccgctttgcgtgctgccgtctgaatccgtgaccgtcagcgagccgtcctgtgcggcgcaggtgaggacggagaggtcgagcggctgtcccgcgctgtcgatggcgtttgcgtatgtccagtcgtggccctcgatggtcaggccgtcatccgttttgccgcagccgacgagcagaaaaatgagcagcagcggcagtaaaatcttgtatttacctgtcatgtgtttttcctttccaccttttgattttcaatcctatcagcacaccaagtcccacgacaaagagcgacagtgcggctaaaaacagatgcgaaggaaaccgacccataacgtagatgtctgtcgccatatcaacgccgccgacaatcgaaacatcctctggaataggcggtccggcagtaaaatactgtacggcacatatgagcaacaccggcacgctgacggccagcagcacccatgcactgatgcgcagggcctttgcacgcttgacatgtgccttttctgacatggctgacgcgctcgacgggggagcggcaccctccggcgtgccggtcagctctgcgagcggaacaccgaaaaagcccgagagtgcgaagagattcgccgtgctcggcagcgacgagccgtcttcccactttgtcacggcttgccgcgagacctcgagtgcctgcgccagcgcctcctgtgacagcccgcgctcctttcgaagcgtgcggatgcgcgcgccgagttcgttgtccatgatcgtgcctcctttgccttgatggcgctatcgtagcagtttttggcgcaaaagtccaccaagtattccgctactatcggtagcgaaacggaaaaagccgcccgaatgggcggcttttcgcgcgtatttacttcttgcggcagctcagctcgccattttccgcgtcgagcacaagcgtgctgcccgcggcgaggtcgccgcgcaaaatctccttggcgatcagcgtctccgctgcgctctggaggtagcgcttaagcggacgcgcgccgtagatcgggtcgaagccgcgctcgatgatgaggctcttggccgcatccgtgacttcgagcctcagcgtcttgtcggcaaggcgcttcttgagaccttccatcaggatgtcgatgatgccgctgaggttttccttcgtcaggggcttgaacatgatgatctcgtcaagacggttcaaaaactccggacggaacgcgcggcgcagctcgcccatgacggcggcgcgggcactctcggagatgctgccgtccggctggatgccgtcgagcagctcggaagagccgaggttcgaggtcaggatgatgatcgtgttcttaaagtccaccgtgcggccctgcgaatcggtgatgcggccgtcgtcgagaatttgcagcaggatgttgaagacgtctgggtgcgccttttcgacctcgtcgaacagcacgacactgtacggcttgcggcgcacggcctcagtgagctggccgccctcgtcatagccgacgtatcccggaggggcgccaatgagacgcgagacggagaatttctccatgtactcggtcatgtcgatgcgtacgaggttatgctcatcatcgaacaggcagtcggcgagggacttggcaagctccgtcttgccgacgcccgtgggaccgaggaagaggaagctgccgatcgggcggttcgggtccgcgatgcccgcgcgcgagcgctggatggcctcggtcacgagacgcacggcctcgtcctgaccgacgacacgcttgtgaatgatctcgtcgaggcgcagcagcttttcgcgctcaccctccatcagacggctgacggggatgcccgtccacttgccgacgatgtcggcgatctcgttttcagtcacggtgtcgtgcaccatggagttgtcgcccgtgtgcttttcggctgcggcctcggtgtccttgagctgcttttcgagggcagggaggtcagagtatttgagctttgcggccttttcgtactcgaggttcgcctgcgcgcgctcgatctcgccgtgcatctgctcaatctggctcttgagctgcttcacgctgtccacgccgctcttttccgcctcccagcgggacttcatggcgttgaactgttccttttcatcggcaagctctttcttgagttcttccagacggtcacgcgagagctggtcgtcctctttcttgagagccatctcctcgatttcctgctgcatgatcttgcggcgcaggtcgtcaagctctgcgggcatggagtcgatctccgtgcggatcatcgcgcaggcctcatcgacaaggtcgatggccttgtcgggcaagaaacggtcggtgatatagcggtcggagagcgtcgcggcggcgacgagcgcattgtcgtggatacgcacgccgtgatagatctcatagcgctccttcaggccgcgcaggatggaaatggtgtcctcgaccgtcggctcgttgaccatgacgggctggaagcggcgctcgagggcggcatccttttcgatatactggcggtactcgtcgagcgtggtcgcgccgatgcagtgcagctcgccacgggcgagcatcggcttgagtaagttaccggcatccatgctgccctcggtcttgcccgcgccgacgatggtgtgcagctcatcaatgaagaggataattttgccgtcggacttcttgacctcgttcaaaacggcctttaagcgctcttcaaactcgccgcggtactttgcgcccgcgatcagcgcgcccatgtcgagcgagaagatcgtgcggtccttgaggccctcgggcacatcgccgcgcacgatacgctgggcaaggccctcggcgatggccgtcttgccaacgcccggctcgccgatgagcacggggttgttcttcgtcttacgcgacaggatgcggatgatgttacggatctccgcgtcgcggccgatgacggggtcgagctcctttgtgcgggcgcgttcgacaaggtccgtgccgtatttcttgagcgcgtcataggaatcctcgggattgtcgctcgtcacgggggaggtcttgacctttgccagctcgtcggagaagcggcttctcgtgatgccgtggtcggagagcagctggcgcacgctctgcgagccctcggagaagatggcgagcatcaggtgctcaacggagagatactcgtcgtgcagcttttcggcggtcttttcggcaaggttcaggatcttgccgacttcgggcgaggcgtacacctcaccgctgccgccggagatgcggggcagattgcggatcaatgtgtcaagctcggagagtaagccgtcgcaatcgacgcccatcttaccgaacagtgacccaatcagtccgccgtcctgatcgagcagggcatagagcaaatgttcggtcgttacatactggttgccgttttcctgcgccatgctctgcgcggtcttgacggcttccaaagccttttgcgtatatttttcagcattcattcaagttcacctcaaatttgtgttttttacaattaagtgatcagatgagaagcgttctgcttctcagatcgccgcggtaagccatttcaacgtcgttcgctgagagcgagccgtcgagatagcccttgagcagccggtcgaagagctggacgtaagcgctgatcgcaccggcaacgtcgtccgctgtcagcgccttgccgcgcggcatcgcaagcggacggacgaagcgcccgtcgtacagcgcgcaggaaatggagctgccgagaagcggtgcgagacacttgtcttcgatttgcacccagagccggaagaagctcgtcattgcggagatcagcgccgccgactgcgtgcggaacacgatgttcagcgtgcccatcgtctgggcgtcgccattgctcaggtcgacctcgtacttgaccgtgggacggtacttatacgataagctcgacttgagcgacatcgtggacgagccgggagcgaagaacggcaccagctcgcgcgtgggcgtcatcagctcttcaatcgcctcgaaaatatcgttccagcggcgctcgggcgtcggcacggagacgtactcggccagaatctggttgacgagcgccgaacggttcgtgcccatccggtgagccagcgcgtcgacctcgcgcaccacatcgtctgacagcgtcagactgtaaagatttttcttcatcatgcgcctccttggggtcctttttctttctggatgctatcatagcatgagaacaaactttgtcaatagatttatataaatatatttacgagttatatgcgaatttacacggagttcataattgcgaaggaagcggaaaaagggaaaagccgcaatgaatttcactgcggcttttcccttttgagagatatgagagatgagagaatagcaaatttacagcaggccctggagcaggatgatgacgatcaggatcggcagcacccactggaaatagggcttgagcttgggggagagcttgacgcccgcgcccttgttgacctcggcaatgtacttgtcaaagccccagccccacttggtgacgcagaacagaaggtagacaagagagccgatgggcagcaggaggttgctcacaaggaagtcttcgctgtcgagcacgtccttgccgagaatggggtggaagtcgctccagatgttgtagccgaacacgcagggcaggctcaggagcatcagaagcactccgttgatgcaaacggcctttttgcggctccagccgaaggtatccatgcagacggcgaggatattctcaaataccgccagcaccgtggacatactcgcgaacatcatgaagaggaagaacagcgtgccccagaagcggccgccggacatgttgacaaacacctgcggcagcgtgacgaagaggagggaggggccgttgtcgggcgcaacgccgtaggagaagcatgcgggaaagatgatggtgccggccatgagcgcaacgaacgtatcgagcgcgcagatgcgaatggattcgccgacgagagtgtgatcgtcggacatgtagctgccgaagatctccatcgcggcaatgccgagcgagagggtgaagaaggcctgattcatcgcatcggtgatgaggctgcgcaggccgttttcgcggatggaatccatcgaggggagcaggtagaacttcatgccctctgccgcgccggagagcgtcaggctgtgaccggcgagaatgaggatgagcgcaagcagcgcgatcatcatgaccttggatacgcgctcaagacccttttgcagaccgaacgaacagacgacaaagccgacgatgacgatggcgaccgccaaaatgcccatttcaacaggattggccaacagctcgccgaacacggcggacgcgtcctccgcgggcatgccggagtagaacttgccggtcaggaacctgccaaagtagctcaccatccagccggagaccgtcgtgtagtacatcatcaagaggtagcagccgatcaggcagaaccagccgtggatgtgccacttggacttgggcttttcgagcgtcttgtaggcgaggatcgcgctcttgtggctcgcgcggccgacggccagctccatcgtcagcacgggaacgcccatgatgagcaggcacagaatgtagaagagaacaaaatagccgccgccgtttttgcccgtcacataggggaagcgccagacattgccgatgccgatggcgcagcccgcgctgacgagcaggaatcccaggcgggagcggaacgattcgcgtttcatgttgatcgacctcatttgtaaaagatttatgaacgatgtgcttatcttaccgcaggaagatgggctttacaagaccgattatcggatgatataataagcaaaacttatgttatgaggaaataagtacatgaatcgcaatcagctacgctattttgtctccgccgcggagcaccggagcttcacaaaggcggcggagcagtattacatctcgcagaccgcggtgacgcagcagatccagcagcttgagcagacgctcggctgcgagctcttcgaccgcagcacacgccccgtgagcctgacgagcgcgggaaagtcgttccttttggacgcaaaagcgatcttagagcgcatgagccgcgcacaggaacgcgtgcatgacgcggcgacgggcctgaccggcacgctgcgcgtcggctacgtgcgcggctacgagcgcagcgacctctcggtcctgatgcgccacttccaccagaaaaacggaaacgtgctcatctcgttctaccgctgctcgacggatgtgctggccgcggggttactccatcaggagtatgacatcgtcttcacctgggactcgacaaacctgcgcacacaggagggcgtcacgtttcagacggtcgaaaaggcgcggctcgttgtcgcgctctatgcgggtcatccgctcgcgcagcgccgccagctcacgcggcaagagctgcgcggggagaacatcttatatatgtcgcccgacgccgcgcccgattcctacggcgacgcctttttcatgcagcgctacgccgaggcgggctacaagccgaatattctcttccgctcggcggacaccgaaagcatcctgatgatggttgcggcggaggaggggatctcgctcctgcccgactactgcaccgaccgcctttacaatgccgacaacctcgtcttcgtcccgctcgtgggcgaaggggaggaggaagagatcatcgccgcctggcagagcggcaaccagaatcccgcactgggacggtttttgacagagctcaatcaaaaagacccgccttactgaggcgggtctttcctattacaattacaatatcaattgtaaattgtcacgattcggccttttcagcgttcagtgcttcaagtgtctgctccatttcggccgtttcggtgcgcggctcaaggcgatgcaggcagtcgaggcattcggtacagtgcttacgcttgtcctgcggccaaagggcgctgagttccggcacgttgatggcttgcttctcgagcaagagtcttattttccaggtgatgtaaagtgtaatgccattccaccacggggagcccattttgcgtccgacatcaagcgccttgctcagccgcgcggcggcggagacgtactgaccgtcctccacgtcgaacagcgagaggtacgacagcgcgattggcatctggctgtattcatggaaggactgatagagctcctcggcgtacgagagcagctcgcgcgcgacctccttttcaccgctctgataggcggcgacgccgtagtcggtgtagatgatggccgcgccggggtacgagccgcggcgctggttgaagaggatggccttgtcgtagtattcgagtgccttgtcgaagttgcgctcaaggcggtacgtttcggcaatatagttatacgcgcccgcgatgctgatgacatagcggccctcgccgtccgcgtcgagtgattcaaaaaagctgatggagcggtcgagccaactgcggcacttgtcgtattcgccgatcatcaggtacatgaggccctgtaggcgcaggaacttaccccagtccggcgtattttccaaacgcgatttatactgcatgccaaggcgcagatgctcacgcatgacgggaagatcataggtctggatggcatagtagatgaactgcaaatgcgcgttcgcggccatctgccagtcgcccgcggtggcactgctcttgaggagctggccgacgacggggagacccgcgtcgtattcgccgccgtggatgtagtagcggctttcgacgtacaagagctgacgctcgagctggtcgagctccttggcgttcgcgccgaactgcgtggagcgcagcgaggcgagctcgcgctcaaggatctgaaagtagccggtcagaccatcctccttgactgtcagtgcgtccgagccgtcggtcaggatcggcatgagctcatagcacataccggcaaatgcgtcaagggagagtactttatacttgaaggctttgaaggtgtcgccgcctgcggtgaagtgctgcacgagctgatcgtagaggtcggtcgaaccgtcgctgccgagttgcgcctccagatattgcgcggcgcgcagatgcaggatgcggcgcgcggactcggactggcgctgcgagagcatcgccttcacgcgctcgtgcgtgaacgaatagccgagcaccttgccgcgcgtggattcggtgagcagatttttctgcttgagctggtcgcagaggtacagaagctcgagcggcgtttttgtcagaagagaggtgagaatgtcgaacggcgcccagtcgcggaagaccgagatgacgtcgagtacctgcaattcatcggacgaaaggcccgcgaggcgcatctggatgatgctgtccgcgctggcagggatgtttttgagcccattcgactcgtgcatcgagtcgagcagctgcacgaggaagaggccattgccctccgtgctctggtagaggttgtcgatctccttctgcgagtagcggcccggggcgtagaagttgacgaagcgcgttgtctcctcctgcgaaaaggcgtcgatattgtacacgtcgagcagcttgtcgcgcacggcgttgttgagcacctgctgggcgtagggctgcaaaatgtcgcggctcgtgcagatgatcgtgatgttcgtgctgcgcaggcggtgcagcagcatcgaaaggaggtcggcgctgttgttgtcgatccagtggatgtcctccaaaatgagcagcaccggcacctttttggcgaccgtcgacaaaatgagcagcgtgctctcaagcgcggcgagataatctgcgcccgcgggatagtcgctcgaaatgccggagaaattgtgctggcattcaacggacaagcaggggaagaggcctgcggcggtcttaatgtaaacatccggaatacggatattttcggattcgaatttcgggatgagctggagcatgatcgtgttccacggggcgagcacggtgttcatctcggactggtagcacgaggcctggcagatcgcccagccggaaaaatcgtactggtgcaggatgtagttgatgaggtatgtcttgccgacgcccgtcttgccctgaatcagcgcgcagatcttgtcgctttcaaggcgcgagccgttgcacagcgatacgagcttgtgcagcaccgcgtccttgccgatgagctgctggtcgctgccgaccttgagcttgtaggtcgaggtgttccacgcgtcgacgatctgatagtagagcgcggaggtctccttgagcggtgagatgctgaattcgtcggaaaggttcttgcagagcgtatggtaaaggccaagtgctttacggaacttcttctggtcgcggtagacctgcatgagtgtggagaacgcgctttcctccagcgggtcgatggcgatgtactccgtgccgtatttttcggcaacgtcgagcttaccggcgtaatacgcctccttttccgccgccaaaagctggtggaggtactgcgactgatagagattgcgctgatcgctcagccatgcgtcaaacgcggaggagtgggagacattgaagtccttcagaaattccccgtgataggcgctgagcatgtcgccgcgctcaaaatcgtagacatcgcaggcgatctcaacgtcggcggagaattcaacgatcaagcgctggccggggacgaagggatcgaaggcaaacgccttgcggatggtgtagatcgcgtggcgtagatttttgagcgctgtggcggaatcggtatcctcgtagagcaggccgatgagctcgctgcgggtggttttgcgcttgaggatcaaatagtacaaaagagcgtcggcttttttataggggagcgtgatctcccgcccgtcgacggaaacggcgggcgtaccgaacagttttgcgtttaactcaggcatgtcaaggcctcccaacagaaataacacgttagtgcagtaaacaaaggtagtatactcaaaccgttgaaaaatagcaagtacttcgacgaaaatacgatattctaagcgaaaaataacgctatggtcgaatacctcaacgctaattcaacgcgcgtatgatataaaggcagcatcaaaatagtacgggtctgccttttgctgcccgtttagtttaggaggcatccatttgaattacgttggaacagcgcgtccgatccacgacgccaagggcaaggccacggggtataccaaatacgccggcgatctctcgctgcccaatatggcgtatctctgcatgctccacagcaagattccgcacggctatgtcaaggcggtccatgcggaaaaggcgctggcgcttccgggggtttacggcgtttatcactgcctgaacacgagcgagcgcaagtataaccgctaccgctcgaacttcgaccagtcatacttaccgaacgaagagtgtgcgttcaacgattacgtgcgctttgtgggcgacaagatcggcgtggtcgcggcctgcgaccaggaaacagcggagagagccgcgcgtcttgtcgaagtcgagtatgaagagcttccgttttccatcggctttgatgatacgctcgcgggcaagaactgcctggagggcgaaacacccgtccgagacgaatacacgctggaggtcggcaaaaagcaggagagcaccgaagggctcattgaggtgtgcagcacgatggagctgccgcgcctgcatcacgccacgatggagacgcacgcctgcattgccgactatgacccctatagcgacatgctgaccgtctactgcccgaaccaggccgtgcacggcattcgtaccgtgctcgcggacttcttggagatgccggagagccatgtacgcgtcgttaaggcgacgatgggcggctcgttcggtgccaagcaggagtggtttttagagcccgtcacggcgctcgtcgccaaaaaactctgccgccccgtcaagctcgtctattcccgcggcgaggcgatgaccgacacgatcgtgcgcggcgcgatgcgcatgagcgcgcgcggctactacacgcccgacggcgagatgaaggaaatttactgcgatgtgacgctcgacgcgggcgcttacatcggcaacgcgggcgactatgtccgcgcgctggccggtaagccgacgcgctgctaccgcattccatacatgcactatcatggacaggtcatcagctcgaactcgccggtctccggcgcgttccgcagctggtcggcagcagaagaggcgctgatgatggagcgccagctcgacgccgcggcggaaaagctcgacatggaccgccttgcgattcgcctcaagaatgtggcgcgcagcggggaagaggacaagaaactccacctgtcgctcgaagacatccgcatcggcgatgcgatcacactcggcagcgaaaagttcggctgggacaagctgaaagctgaggacgcggcgttcaacgcctctcagcagcgctaccgcaggggcgtcggcatcgggatcggcggtcacggcaatacatacttcccgcgcttcaatgactacggcgagggcagcatcagcttaaatgccgacggctcgatgcaggcgaatttcaccctgcacgaccacggctgcggcacggtgacggcgatgcgcatgatcgccgccgaggtgctgaaagtgcctgaggataagatttacatgaccgagggcgacaccgcggtcacgcccatcgactacggctgctttgccagccgcacgacctatgtggtcggccgcgccgtgcaggatgcggcgaacgccctgagaaagaagatgctgcacgcggcatcggagcttttagacgttcccgaggatgagctgttcttaaacgacagccatattcttcgcgtggggcaggacgagccgcttctttcgtttgcagagcttgccaaaaagagtatgcacacccacgccggcaacctgacagcctacgcaagctattcgaacgtgacgaaccccggcgtgacgggcgcgcactttgcccatgtcgaggtcgacacctggacgggctttacgaaggtgctcgactatctcgccgtgcacgacatcggtcaggccatcaaccccggcctgtgcgaggcgcagatccagggcgcggtgcagatgggctgcggcgctgcgctgcgcgaaaagatgaccatgcagaaggacggccgctgcacggagagtttgtccaaatatcatctgttccttgcaaacgacctgccgaacatccgcgtggagcttttgcaggacggacgctcgaaggagggcccgttcggcgcgaaatccatcggcgaggtctgctatgtgccggtcgctccggcggtgtgcggcgcggtgaacgacgcgctgcacgcgaacctctcggtgctgccgtatgatcccgactgcattctcaaatatctggcggaggtgagagagaaccatgacgcttaattttattgtaaacggaaagcacgtcacgctcgagaccgagcctgaccgccgcctgctcgacatcctgcgcgaggacctgcacctcacgggtacgaaggaaggctgcgcggagggcgaatgcggcgcgtgcacggtgctgctcgacggcgaagccgtccactcctgcctgaccgccgccatccagctcgaaggccgcgaggtcacgacgatcgaaggccttgccgaaatgggcgctctcgacatcatccagacctgctttgtcgaagagcttgccatccagtgcggctactgcacgcccggcatgatcatgtctgccgaggcgctgctgcgcaaaaatcctgacccgacggaagatgaaattcgtctggcgctctccggcaatatctgccggtgcagcggctatgtccagatcgtgcgcgcggtcaagcgcgccgcgaaggagaggagggaagcgcagtgcagagcttaacgcccaaaacgcttgccgagctcgcgcaggcgctttccgccgccacggaaaaggcgaagatcatcgcaggcggcacagactttatcatcaaggagcgcgcgggcaagttcgcgcccgaccttttgatctaccccggcttcattcccgagctgaacaccgtcacgaaagaaaacggcgtactgcgcatcggcgcggcggtgccgatgaacggcatcaccgccgcactcaaggacgacaaggcgttctgcgccatcgcggacgcggcgtccgatgtcggctcgccgcagatccgcgccaagggtacgatggcgggcaacctctgcaacgcctcgcccgcgggcgatatgcttccggtctcgtggctgtatgatgcgcagcttgagctgatgaacgccgacggcacggcgagcgtgacgccggtgaacggctttatcaccggcccgcagaagacgatcttgcggccggatcaggccgtcacggccattctgatcgacttgaagcagtttgagggctttgtcagcgcgttccataagatcggttcgcgcaagcgcgtgtccatctcccgcgagggactggccgccgccgtcaggctcgacgaaaacggtaaggtcgaacaggcgagactttctctcggcgcggtcggcggcacgccgatccgcgtgacggacgcagaggagtatatgcgcggccgcgtggtcgatgaaaagctcgtcgaagagatcacgccgatggtcgccgagaccatccacaacaactgccgtccggcaaaccgcctctataagactgaggccgcccgcggcctgacggcggataccttcgccaagctgatgagccgcctgtaacgcgaaaaacagcatagaaaaaggacgcatccggtcggatgcgtcctttttcatttgcgattgtatgttacgcgcgctcggcctcttcgatgaccttgagcagcgagccgtccctgatgacctgataggacttttcgatgtcgatgctgaggttgcggtcggcatcgtagtaggggatggtcttgcggtaagcgtccttgagagggccggtgaccttgccgagcttgagcaggttgtcagcgcgctggtcgcggcgcatttcgacagcctgagcggcgtgcatgagctccatgccgagcatgtagcgcaggttgtcgacgatgcggagagaacgcataccggcgagcggcaggttgctggcgtgatcttcaatgccgttggcgaaggaagtgatgtcgagcgtcgtggtgttggcgagccaacggttctcggcgtcgagcgcggcgaaggtcttctgtatcgtggagaacgcgatggtcttgacctcgtgcggggtcaggaagcggttgagacccgtgaagcccgggtcgacgatcttgtagaggcggttcgtaatggcgtgggacatgtggcacagcgccgcggccagcatgtcgacgccgagagagagggtcgttacctcaaagttcgggctgacggatgtggttccctcctcatagaggatgcagggattatcgtccgtgcggttgatctggagctcgaggatcttcttgacgtactcaagagaatcgtagacagagccgttgatggccgcgccgcagcggaaggagagggggtcctgcagcgcgcgcttggaatcgggatgctcaagatagctgccctcgaggaagcggcggcactctgcggcacaatggatctgaccgggcaggccacgcacctcgttcacgcgctcgccgagtggctggaggccgccgttgagaccttcgaggtgcaggcagtagatggcgtcgctcagcttgatgagctcttcgacctccttgacgagcaggaccaccatggattcgccctgcgcgttcgaggagacgatggaaaggccgtccttcgggccgaggatcgcgggctcgatgccctcggcgcgcatggcgtcgatcgcgggaatgatctcgccgtgatattcgacctcgccctggccgatcatggcctgaccgatcatgctcattgtgctcacgtcgccctcaccgacggcgccgcggcgcatggcgcgggggtggatgccgtgattcaaaaactcttcgtacattttaggaatgttcgaggcgatacccgtgcggccgcagagggcggtgttgaggcggatgcacatcatcgcgcgcacttcttcgacgctggcaaacggcgcaacgccgagggagtggctgttgatgaggttgcggttgtactgctcgaaaaagtcctggctgaattcgcggtccttgttccagcccacgccgtggttcaggccgtagacgggcttgccgtcagccgccatgtcaaaaagcacctggcgggatttgtcgacgagggggatgacctcagggtcgatctgcacggggcggcggtcataaacgacggagtaaagatcctccagcgtcaggtcttttccgtttaagatcagagtttcgctcattttgtaaaaacctccttgcggtaaataaaacaaattgttgtcactttgattgtttatattataatagtgagccgtcaaaacagcgttgaaaattatgaaagaaaaaaatttaccccgttcaaacgattcaacgtttttccaactttactgtgctatagtgtcgtcatcgcgggaaaggcaacgaattttgcggtaaggaagacgcagaagatgtgtatcccgtatcaaaaccgtgcggagagacggcagatcactccgcagcgaaacaacaggaggagaaaatgcttacactgattgacaatattacaattgtcctgtgcgtggtcggcatcttcgccatcagcgtcttcatgagcaagaagaacactgatatggaagcctactatcacgcaaacaaggctctgccttggtctctcgcggtcggtacgatcgctgcatcctggtacggcggcaacggtacgatcggtacggtcggctatgttaccaccatgggcctttccgcattctttatctggtccatcggcgcgcaccttgtgcgtttcccactggctctgtgggtcgctccccgcatttccgtcaaggtcaactccacgatgaccgagctgctcgaccgtttctacggccgcattgcttcctttatcggtgcgatcgtcctgctggcgacctgcctctccatctctgagattggcgcctgcggttacgtcggtgttgctgcgtggaacatgaacaagttcctcgccgcggccatcgtcattgccatttccatcggcctttcctgcgttggcggcctgctcggcgtcgccatcaccgatatgatcttcttcttcctgatgatcgtatctgtcgcttttgtcttccccagtgcgttctacggcgtgggcggcttcgctgctctcgacgagatcttcagcacggttgatccctcgatgatgaccccgttcggcggcatccctctgggccgtgccatcgtgctgatcctcatctgcatcaacgtctataaggatcccgcattctatcagcgcttcaccgcttccaacggtcccaagaccggtaagcgcgcgatgctgacctgcttctccatctggctgagcatggacgtttgcctgatgttcaccgctatcgtcatccgcgcgatggatcccgcgctgaccgtccagcccgaggttgcttacatgcagctcgttctcagcggtctgcctcccgttggccgcggcctgttcgtcttcgcgatgctcggtgccatcatctccacgatggatacctactatctggttggcggcgagatcgtgtccaacgatatcatcggcgtcctgcgaaaaaagccccttaccgacaagcagtccatcttcatttcccgtattgcctgcgtggtgttcggtgtgattggcctgagcgttgcgttcaagttcaagctggtctatgatgcgatgatccttgtcacgagtctctccatgtctgcgctgttcgttcccatgatggctgccatcatgtacgatggcaagaagaccaacatgtctggcctctgctccatgatcgttggtatcctctcttggctctggtttgactttaatcccctcagcattgaagccctcggcggtaacgtcgatccgatgctcgtgtctctgcctatttctttcgtagcgttcctcattggcaaccagttcggtaaggttctcaacacaggctttgccaagcccgacggcgtgaacattgagaagggcatgatcatgacctcctccggccccgtcagcgaggaagagtacaagaaggagatcaaagtcgagtggctcggcatcgacggcgctctgtgccttgtctatgtggcgctggccgcgttctacagcttcggcatcatcaaccgtatcgactggatcatcggttgggtcgccccgctggttgccggtatctccaccaccgcgatcttcctgcgctatctgtatcaggtcttcaccttcggtaagactcctgctcagaagaagtaattcaaatgctccaagagaaggcagacctttccgggtttgccttctcttgctctatcgttcgctgatctggcgggcgatagggcaggtcattcccttaaaagcgggccgaaagcggctccttaaaaaatttttattgataacgttgaaagataaacgcgaattcaacgatggcgtgttatactaccatcatcacaacggaggcgcagagtcgcatccctccgcaatttaagaggtgcaatatgtctgaagtagataccatcaaaaacgtcaccatcgtcggcatcggcacgcaggggtcgatgatcgctttccgcaacgcgctctacggcaagaacgtgaccggttacagccgcacgcagccgtcgatcgacacctgcaagaataagatcgacaagtggctcgctcacttcatcgaagaggggaagctgacaaaggacgaggccgacgctgtccgcgaccgcatccattacgcgacgacgctcgaagaggcctgcaaggacgctgacctcgtcgttgagaacgtgccggagaagatcgaagtcaagcaggctgttttcaagcagctcgacgaggtctgcccgaagcactgctatctgaactcgaacacctcctcgctcctgatgagcgatatctataaggatgtgagcgacgagcgcaaggccatgactttctccgtcgaccacgacgaccccatccgcaacagctatctggagatgatgtggaaccccagcacgtctgaggagacgaagaaggccgctatcgcgcactatcacaccctcggctttgagcccgtcatcaccgagcgtgagatcaagggctactccatcaaccgcgtgtggcgcgctgtcaagcgcgagtgcctgtacctgtgggctaacggctatgtcaccgacgtcgccgagttcgaccgcggctggatgaccgagtggcacagcaacatcggcccgttcaagctgatggacctcattggccttcagaccatctacaacatcgaaaattcctactacgccgccagcggcgatgagcgcgacaagccgcccgcaaagctcaaggaaatgatcgacgcgggccacctcggcatgaagaccggccagggcttctactccggctacgacaccgaggccggcaacctggacgtcggcaagaagtaagcaggggagaggtccatgaaactcacggatcaccagcagaaaatgctggacggcgcgttcggcaagggtaaggccatggccatgcagatccagatcagcgtgggcaagtgctttgatgcggagcgcctggttcccgtcagccgcgcgcacgtatccctcagcgcgcaggaggccgacatctggtttgcgggcaagctcctggacgcgggggcttcctgcgccatcgcgccgactgtcaaccccggctattccgtcgactattttcgttctcggctgactgatgccgccgttgaaaacatgcgaaagaccgagcgtatctaccgcggcctcggcgcgcgtttgacgtactgctgcacgccgtatcttgccgataacgtcccgtcgtatggcgagatcatcgccttttccgagacgaacgctacgatctatgccaacgctgttctcggcgcgcgcacgaaccgcgagagcgcggccagcgccctctgcgctgccgtaacgggttatgcgcccgaatatgggatgcttctgcaggaaaatcgtttcgccgacatcaccgttcacgtggacgcgaagatggagtcggactttgactacgccgtcctcggcctttgcggaaagaagatcggcaagggtattccggcgttccttggccttcccgagaagatcagcaccgaggcgctcatcgcgctcggcgcggagctgaacgtttcgggcagctacgacctctaccacattccaaatgtcacggcagaggccgcgcacgggttcgacctttttggcggcaaagcgccgaaaagggaggtcaccatcacacagtctgacttggagcagacgcttgaggcgttctctccctcggcggacggcagcatcgaatattgcattcttggctgcccgcactacacgtatgcgcagatcgaagaagtcgagcgactgctcggcggcgagaaggcgaaggccgacatccatatcctgacgtccgccgccatcaagcgcgaggcgaaagaaagcggcctcgaggaccggcttctggaccttggcgcggacctgatcgccgacacctgcgtggacgaggcatgctgctggggctatcttgccggaaagtccggcgtgacggattcgcccaagggcgcatactacatggaaacggcgggcatccgcatggccgtgcgcgacacggccacctgcatccactgggcaaagcaggggagggtgtgctgatgaaaaagacatttacctgccgccagatcgctgcgggcagggtaaaaggtgaagtgctcacctgcaccgaccagatcctcttttaccacaccgacccgaagaccggcgtcgtgaccgaagttggccacgcgctcgagggcgtgagcgtcaaggataagattctcgtctttccgggcggaaagggcagctccgtcgtgcagatggacgggctctacaagcttgaactcaacggcgccgcgccgcttggcttcattgtgcgcgagcccgacactgtgctcgtctccacggccatcatcatggagatcccgatggtcgaccgcgtagaggacgaattttacaatgcagtaaaaaccggagatcaaatcgagatcgacgccgacgaagaaacaatcacactgatcgaacaagatcactgaatttcaaaaaagcgaaaggacaagcagtatggacactttgattttgaacggccacgacctgaccttgcaggacgtttatgacgtcgcctacgacggccgcaaggtcgagatcgcagccgatgcctacgcgcgcctcgccaagggccgcgagatcatgcaggagctctccaagggcggcaaggccatttacggcttcaaccgcggcgttggccagaacaaggacgtcaccatcgacgaggacttcatggagacgcagaaccgcatgatgctgcgctcccactccctcggccttccgccgttcaacacggacgaggaagtgcgcgcgatgatggtcatccgcctcaacaacatgcttatcggcgcgtcctgcgcgtccgatgacctggcaaacagctaccgcgattttctgaaccacggcatcacgccgcgcatcccgcgccgcggcgccgtcggcgaggcagacatcaccaccatcacccacatcggccttgccttcatcggcgaggaggacgtcaactacaggggcaaggtcgtgagcgccaaggaagccatggagaaggagggcctcaagcccctgcatctccagctcaaggacacgcacaccatcatgctctccaacagccagggcgagggcaccgcggccatccttgtccacgaggtcgagaaccttgtcaagatgtccgaccgcatcttctgcctcgactacgagggcctcaacggcaatattgagccgatgcgcgaggatgtgaacgagctgcgcggcctgcccggccagatccgctgcgccgcccgctgccgcgaggatctcgagggcagctacctctacagcgacaatcgccctgagcatgcgctgcaggacccgctgaccttccgcggcggcttcatcatcacgggcgcggtcgaggatgcgctggactacgttaagaagttcctgagcatccagatcaactccccctcggacaacccctgcatcatgctcgacaagaaggatgtctttgtcaactcgaatttcgagacgacatcgctcgttatcggcgtcgagatgcttgccatcgcgctcgcgcatctgtcccgcacggtcaactaccgcctgattcgcatgtgcatgcccgagttcacacacctgccgcgcttccttgctccgcgcaacggcagcgcccacggctatgacgaggtgcagaatgtgctctcctgcctcgacgcggagaaccgctatctcacgaccccgtcgtccgtcgacttctatcccatgcagggctccattgaggaccacgcgagcaatctgccgctggccgtgaccaagtgccgccagatggtcgacaacctgcgctatctcgtgggtatggaggcactgttcgcctctcaggccgtcgatctgcgtaagagcgacgataacggcgactacgtccaccttggtaagggtacgcagaaggcctacgatgtgctgcgagccgtcgttcccgagatgaagagcaaccgcagtgtctatgacgacatcaacaaggcctatcagcttgtgctggaagagaagttcctcgccgacggcgaataaaaacttaatgctatagaactttcaccataccgggatcggcagaccttccgcattgagaaagctgtgaaccgacgtcgcagtcgcgaccaaaacattcgaagagttgagaatacttctcttcgccggagaggtactggtagagatcgcattccactttatcgagaaccacgcagcgcggcgagtaaacaggcaaaacagaacggtattcataaaaaggtcgctgatttgccatgaagaaggcgttgatgtaagttgttttatatgctatgcttattagtgagaagtcgttggcaaaccgtgagttgtgggggtgaaaacaaatgaagtatttagttttattagcaggctgtggcctcggtgatggttcatgtatagaagaggtaattctgacgtatgcagcgcttgataaatatgggtgtgattacacgcctgtcgcagaagatgtttccattcagtctgtgaaccacctgacagagcagatagcagaaaagcggaatatccttatagaagcagcccgcatcggtaggggacgcattaaagatattcgtgaggttgattttgcagaatacgatgcattgatcatacccggtggaatcggtttattgaacaattatagagcttccaatgtgataaaaacgtgcgtcacacattttattagcgaaaagaaacctgtcgctgccatgtgtgcgggaatcgactttctccgccgcttctatggaagtaatctattggcacgtaagatggaagaactaactgctgaaaaattctgctttgatgctgaaaataatgtttattacacgcctgctttcagaaaaaccaacaatagctatacgacactattaggtatcgattctatgatttgtgcgttgaagcaggcataaacatctcaatgaaattctgttttgtgggtttaattttggcttaattattgaacagaatagcttacattctgtccgctggctatgtcgtatgtgcaatgcacggcacgtcgctttgcagcaaaaagggcacaccatccagacgctgtaaacgcctgaagggtgtgccttctatttgtcgttatcggctcagttcaggaagtccttgagcttcttgctgcggctggggtgacggagcttgcgcagcgccttggcttcgatctggcggatgcgctcgcgcgtgacgttgaactccttgccgacctcttcgagcgtgcggggacggccgtcctcgatgccgaagcgcagcttcaagactttctcctcacgcggggtgagggtggagagcacgtcgacgagctgctcctgcagcagcgtgaacgacgcggcctcgctcggctcgctcgcaccctcgtcggggatgaagtcgccaaggtggctgtcttcctcttcgccgatcggcgtttcgagggagacgggctcctgcgcgatcttcaaaatctcgcgcaccttgtcgaccggcatgtccatctcggcggcgatctcctcgggagaggggtcgtggccgagctcctgcaaaagctgacgggacacacggatgaccttgttgatggtctcgaccatatgaacggggatacggatggtgcgcgcctggtcggcgatggcgcgggtgatggcctgacgaatccaccacgtcgcgtaggtcgagaacttgtagcccttggtgtagtcgaacttttcgacggccttgataaggccgaggttgccctcctgaatgaggtcgagaaacagcatgccgcggcccacgtagcgcttagcgatggacacgacgagacgcaggtttgcctcggccaggcgctgcttggagcgctcgccttttttgacggcagccttgagctccttcatttcctcttcgctcagctctgtgccgttcttttcggcctcttcgagcttctgcttggcctcgacgcccgcggacatcgcggtcgcgagcgaaatttcctcgtctgccgacagcagcgacaccttaccgatctccttgaggtacatgcgcacggggtcgtcggtcgagaagctgtcgaccagctcgttcgggtcgacgagctcttcctcttcgatctcggcgatctcctccatcggcggctccacatcgtcgatgctgctgtcgatggcctcggcggtgccgatgtcgatgccgagcgtttcgagcgagtcgtagatctggtcgagctgctcgctctcaaggttcatcttgtcgatggtctccatcaggtcgctggagctgagcttgcccttggccttgcccttggcaaagatctccatgagcttttcgttgccctgcagcagcgccgccgcgggcagggaggcgaccagcttttcatccagcgggggatacttctccgcgggcttttctgcctgcgcggtatcctcgttcgctttcttggccgctgcggcctttttcgctttcttcggcagcttgatctcctcaaaatccgcctcggcgagcagcgcgttggcctgttcctccagctctctgctggtcagctgtttttcttccatgtttgctttcctccgttacccttgtatttattcttttccatcgcggccatcaggggatcttcgttgacggccgcgcgcttgtgcgcttcgtctaaaatgatagtgcagtagtccttcagcgcctgtacgccgtttttgagcgattccggcttttgcaggataccgatcaagtggctgatctcctccgacgtgaaaaattccgccagcgctgggatgttcacctgcccgctctcgcgcagctgcgcgcgcagcgccgtgaagaaccggcccaggaggggagaggagaagtcctcttcccggattggcggattctcgccaaagagggaatcgtccagcgtcaaaagccgcagcacgccttcttcggcgagcgccgagcgaaggtcggtgtagcggatcgaccgctcgcgcggctgggcggacgccgcgggattcaggtcccgccgctcctgctcgcgcttttccttgtagcgggcgcgttttcgcgcgcgctcgacctcgagcttcatcgcgtcgggcgtgatgcccgcggcctcggacgcgcgcacggtgtaaatttcgcgctcaaccgcgttcggcactgtggagagcaatcctgctgccgcttcggcaaagccgatacgtccctcgtcgcttttgaggtcgaactttgacttgagctgcgccatgcggaagtccataccgctctcgctgccggaaagcagatgctcaaaggcgtccttaccctggaacttgatgaagtcgtccgcgtcctgtttgatgtactctccgtcgacgagccgcttggggagctcgagcaccttgacctgaaagtcggtgttattgagaagcgtcagcgccttctgcgtcgcgaccttgcccgcgtcgtcgttgtcgtagcagagcacgatctccttcgtgtagcgactgagtaattgcagctgctccgtcgtcagcgctgtgcccatcgaggcgcaagcattgtcgaatcccgcctgatgcagcatcacgacgtcgatgttgccctcgaccaaaataatgttgctgcgcttgctctttttggctaggttcagcccgtataaaacgcgccgcttgctgtaaacgatggtctcgggcgtgttcatatacttcgcgcccggatcgtccttgctgatgatgcgcccgccaaagcccagcacatcgccgcgcacgtcgatgatggggaagatgaggcgcttgcggaatttgtcgtacaacccgccgttcttgccacggatggcaagacccgaggcaagcagctcgccgtcgccatagccctttttccgcattgcggtcagtaagccgtcccactcgtccgccgatgcgccgaggccgaagttcgttgcattgcgccgcgtgatcttgcggtttttcatatactcgagcaccggcgcacccttgggcgagtagagctgatcgtagtaaaagcgcgccgcgtcgcggttgagcgacaggatgcgcgaacgcagccggctctcgtcgctgtgctcttcttccggcacgggcatgttcgcgcgccgtgcgagaaagcgcaccgcatcggggaaggagagattctcctcctccatgatgaagttgatgacgccgccgccttttttgcagccgaagcagtagcacagctgcttgtccggcagcacatggaacgacggcgtcttttcgctgtgaaaggggcagcagccccacagactcccgccgcgcggctggagtgagacataattgctgacaacgtcgacaatgtcgttgcgggcgatgagctcgtccaaaaactgacggtcaaaggccatggcgtcctcctttctcacttctgcacacggaacatttttctatctatggtatatatacgccgaaaatggttgctttcctcttttttgacggaaaaatttcaaaaattttttccctgcacggagaaaatttgacagaccgtgccatttctcctataatttccgcaggaatcgctgcgcaaagggggcggaacatcgtgaatatccggttgtatgcggtaaaattagatcgaccgctctcagaagcggaacggtccacgctcgcgcgttttctgccgcctgagcgacaagaccgcatcaaaacatcggaacccctctgcgcctacgcgctgctctgccgtgcactgcatgaactttacggcttggaggacttaccgcagctttcctacggcgagcacggcaagccgtactttgcggcgcatccggacgttcatttcagcctgagccacacgcgcggtgctgcgctgctggctgttcacaacgagccaatcggcgcggatatcgagtgtcttcgccctgtgagcggcgcgatgcgcacgcgctttcacgcggcaaatgacgccgatttttggcgcctctgggtgcagcgggagagccgctgcaagcgccgcggcatcagcgccgtcagcctgagaaacggggaagtgccggtcgttcccaatgagcgcgtttttgtgttttcaccgttttctgattctcttgcaggcatctgcaccgattcaaatgcagagactgacaagctgataaggtttacagtagacgatctcatataaaaggttccgaagagcattcttcggaacctttttttgctttttgccttacagctccacgatgatcggctcatgtccgatctttggcagcagaacgttcagcagatcctctgttttgaatttgaggctctgcgtgttgtcacaggggtggcaggcgaaatacggcgcggtatatacgtccctgtccatgacgagacggacggcgttgccgctgtcgttgtgcagccccagcacgcttgcagacccgggcgagcagcccagcagctcctccattttttcgggcggcgcaaacgagaggcgggacgagccgatctgatggctcagatccttggtgtgaaacggcttatcttcgggcatggtgagcaggtaaaagctcgtctgctggcggttgcagagaaagagattcttgcagatgcgcacgcccagcgcgtccgacacagcggcgcagacttccatggtctctgccttttcatgctcaatgcgctgatagggaatgtgcagggaatcgagcagcgcatagcttgccatcgcgcgctcggaggcatgctccggcgcggtgtcgtagaagggggataccaacatgcttacgactcttctttctctttcagcagtttttcgccggccttgaatatatcgcctgcgccgacggtcaaaataaggtcgcccgggcaggcgatgcgcgcaagcgcggcggtcaccttgtcgagcgtggggcaatagacagaaccggggatctcgcggctcaggtccatcgacgaaataccgatatcgttctgctcgcgcgcggcgtaaatttccgccagcaccacgacgtcgggtacgcgcagctctttgacaaaatcgttaaacagcgccttcgtgcgcgtgtaggtgtgcggctggaatgcgcagatgatgcgcttgtagggaagtgtcttcgccatttcgagcagcgcgtgcagctcgccggggtggtgggcgtagtcgtcgtagacgtccgcgccgtggaaacttcccttgtactcaaagcggcggcccgcgccggtgaacgttgcaaggccgagaccgacggcctcaccgctgacgccgagaagatatgcggcgctcgccgcggccagtgcgttcatcacgttgtgcttgccgcccacgcgcagggaaacatgagcgtagtaactgccgcggatatagatgtcaaagctcggaagcccgtccgtccagacgacgttttccgcgcggcactgcgcggcgggatcgtcatagctgaaccagaagatcggctgggaaatgcccctgagcgcatcgcgcgcaccctcatcgtccatgttggcgaccacatgtccgccgatggggacgagctctgcaaagcggcggaacgagtgctccacatccgctaagtccttgaagaaatcgagatggtcggcctccacgttcaaaatgaccgcgacggtggggaagaagctcaaaaacgagttgcagtattcgcagctctcggcgatgatcgtatcgcccttgccgacgcgatagccggaatggagaagctgaagcgtgccgccgatcatgacagtcgggtccttctgcgcagccatgaagatgtgcgtcgccatgctggtggtagtcgtcttgccgtgcgtgccggagatacagagggcatttttgtagcccttcatgatagccccccaggcctgcgcgcgctcgaaaacggggatgccgcgcgtcaccgcgccggagatctcgggattatcgtcgtggatggcggcggtgcggatgacaaagtcgcactcgccgaggttgtccgccgcgtggccgatggccacggggatgccgagcgagcgcagatgttcgacggacgggccgtcgttcatgtcgctgccctggaccttgaggcccatgccgtgcagcacctctgccagcgggctcatcgaaacgccgccgatgccggccagatgcgcgcacttgccggggacgagataggagaaaatatccttctgattagtcattgtatcaaatccttgtattatagagtcgtagttattaaagcccctctccaagggctgtgctacactgtaagagatgctgtggattggttacttcctcctaccgcaagacggttcaggaaaggctccaaccacaaccctttacagtattgttaatcagttagatac

SEQ ID NO: 23 - DNA, 387974 bp, Colonithrix sana
  source 1..387974: mol_type = genomic DNA
cactcatccccgcattggttaacaactccagggcacgctgtgcagttgcgtctaattcaatcagttccataggccctccttatattttgtggtgtcagacggttgtctgcatgtccacattatataaaatgaggcccgctttgttattccgaagtttttacggagaatccttgttttacaagactctatgcaatgacttcggaataactatttcctcggcataatcctggttattccgaattcggaataaccaggactcagcgtggccggaatgcgcgccggattgaacggtgcgcgttccggcctctttatggaacaaatacgaatcattcaggagatgcgagatgcagacagaaaatttggaaggacaggaatccatattcggccaagattcggcgtgtgggaaaatgtcgtcggtgctctctcaagtgggcgggacgctgaaacgggtcaaaaaaagcctggggcggattttcaaaaagtcctcgaagcgttcctccaagttgaagaaccataccttcatgttgttagacctgagaccgggcgctgggaatatgctgggggcatattgggagtacgatcctccgtggcttggatcgtttgggacgcccaacacttcggagtgccccaaagacgccgtcgagtgttccttgtggcagattttgcaggctacagcgccatcccgatactcgctatcccagacagcgtgcctgggtattctgcgccgcgcagcctgccgcggcaaatcgctgccacccttattggaagcagctttgcgtatgcaggcagggcttgacccgcctgcgcccatatccggcgaagcgaaagcctaccatattaatcagcgcaatgaaggcattgacttggacggtgtgtccggcgccctgatggcgacgcagaaccttcaaatgcagacctttatcacaaatcccggcagcagtcagagtggtccgcaaaaacagatcgcattcgccgccaaccagcgggacgaggtgcgtgacctgcatgatgtagcaggcgcgctgcaggctcagccggggttgaaacaacaaacctttgtcgctggattttctgctggagctggcgcgagcgccgggaccattggatatcaggaggacgtagcgcccacgttgaaaggcagccccagcggaaactgtatgcccagcatcctctgtatcaacgatcagggcgggcagatcatggagtgcagcgaggatgttaccgggacgctgcgggcgcaggagcatggacaccaacctctgattctgcgtccagcagaacccaaggtttacgaaaaccacggcattgacggaagatacaccgggccgcatgatgtagcgcccaccatgtccgcccgctatggaaccggcgggaacaacattccccttgtacagcaggaggaagttatctgtattgcgggcaatgccattgaccggcagccgcaaaacggcggcaacggcttcggctggcagcgggacatttcctataccctgaccacctcggatcgccacagcgtctatgcccgccagcgggtagatcagttcagggatgatgagatcgcctccacggagagcgcgcggcagcacaaggacgctacagacctcatctgccagccaccctctacttgggatgcggactgccggaatctcattcgccgcctcacgcctttggagtgtgaacggctccagggctatccggatggctggaccgatgttcccggcgcttcggactccgcacgctataaagccctcggcaacagcgttgccatcccctgcgtggaatacctcatgcaacgggtggctatggtcattacgcttgatttggaatgggatttttagttggctttggtaatagctttcacacttgctttcgggtatcttagctttaccattaaaaagatcggaggaactgctatggcagaaaaaacgcgcaacctctgcgcgcagatccccgtggagctgcatgacaaggtacggcagcgacaggcggaatccggcgagacactgagccggtacatgaccgcgctcatcaccaaattttatgaaatggaggacaacgcaaagatggacaaggacaatgtgaggacggtggcgtttcaggtgcccaccgagctgtttgagcagctcaaggcatacctcaagcggaacggcatcaagcagaacgccttcttcctggactgcatccggcaggcgctggcggaggacaccggtgctggcgaagaataagaaatacatcgcgcgaaccgctgctgagattctcggcagcggttttgctttggaggaacaaaatgtttatttaccccgaaaacttgaaagccaagcccatgctgtggctctggctgctgcgggacatcgccgtgatcggcatcggcgctttgctctctgtgctggcgctgacgcagggactcggcatgggactgctggtggtcacggtgctctacgccttcctcaccattcaggtggatggcagcagcattttagacttcctgcgccgtgccgcctgttttctctttctgcggcagcaatactatgaatggaggctggacccatgaatcggaaacagaaaaaggagctgcgccagcggcaatcgacccggcagctcatgggcatcgtccgcgtgacgccccacggcatcgtgacagattccggagagcgggtcttcttcctgatccagccggacaacctctccgtcctgtccccggaggtcatccggggccgcgtccgctccctcaccatgcttctcagcacccaaccaaccttggaaattctggctctggattcccgcgaatccttccagcgaaataaagagtattacctgcggcgactggaggaggaaacggagcatgccgtgcgggagctgttagagcgggacatggcccatttggacgccattcaattctcatccgcctcctcccgcaaatttgtgctggtgctcccactggatgaaaaagccggtgcggatgaaggtgcgctgcggcagttggagaaatccgtctgcgaccacgggctccgcgtgcgtctggcggaggagcaggatgtgaagcgcctgctggcgatctactaccggcaggatctcaccacggaggtattccgtgatttcgatggagaggagtatgtacatggctaaaaagaaaacaaaaccgaaaaagaaagcggcagagcaggtccagcgcccgaaagactttctggacatgatcgcgcccgcggcggtgaagttcaacacagatcacttcatcctcggcagccggtaccacacggcgatggcgctgaaaagctacccgcccatgacggatgagctggcgctgctgaggggccttggcgatatgggtggcgtcaacctgcgcctgacggcacggcaggtcacgcctgccgaggaggacgccatcctccacgccgccaccaacaaaagccgcatggagcggagcaataccaacgactataagcagagcgtcacggcggaggcaaacctacgggatatggcggagctgctggcaaagcagcggcaggaaaaggagccgctcatccactgcggcgtgtatctggacattgccgcggcagatacggaaaagctgcgcacggcgcgggatacggtatccgcccaactggttcgctcccgcatgggcgccgatccgctgctcctgcgccagcgggagggctttctttccgccaaccccgcgggcggcagccagcttgccaattttgcggagcgtgtcctgcctgccaggagcgttgccaatctgtaccccatgaactattccggcaaaaccgatcccaagggcttcttcattggccgtgaccgcttcggctccaacatcatcgtggacttcgaccgccgtgcttctgacaagaccaacgccagcgccctcatcctcggtaacaccggacagggcaaaagttatcttctgaagctcctgctctgcaatgtgcgggaggcgggcaaaagcgtgatctctctggactccgagcacgagatggaggacgagtgccgcgccctgggcggctgctttttggactacctcagtgggcagtaccgcatcaacctgctggagccccgctgctgggacgatggcagcgggccggaagacccggacgcgccggacgctttccgggggacgctgctctctcagcacatctccttcctgcgggatgtgttccgcgtctacaagggctttgacacgccccacatcgacacgctggaactgatggtggagagcctgtataaaaagtggaacatcaccgaccacacggactttgcgtcgacgcggccggaggactatcccatcctctccgacctctacgatacgatccaggatgcctatgacaactatgacgccgccggtctttatccgcgggaaatgctgcgggatctgctgctggggctccattccatgtgccgcggcgcggattcccggtttttcaacgggcataccaatatcacgaactccaaattccttgttttctgtgtcaaggggctggataacatggcggaaaatctgcgaaacacgctgctgttcagtctgctgtcctatatgtcggatcagcttctgacgctgggcaattccgtggcagccattgacgagctgtacctgtggctgtccgatcccaccgtcatcacctacatccgcaacgcgcttaaaagagtacgaaaaaaggaatccgccctgttccttgccagccagaatctggaggacttcacccaaccggggatacgggagctgacacgccccctcttttccatccccgtccatcagttcatcttcaacggcggcaatgtggataagaaattcttcatggataacctccagctggaggagtccgaatatgccctgattcgggacccgcagcgcggctcctgcctctacaagtgcggcaatgaacgctatctcttgcaggtgcgggccccggagtacaagcaggctctcttcggaacggcaggtggacggtaatggcagtacccgtcgcggcactggcaaagctcgccgctgtcgctctctcggatgaggacacccggcgaaagctgggctggatcgtggcggcgatctgttcaccgttgatcctgacgctggcgctgatctgctctctgctctccggcagcgcggagcacaacaactctgctgttctgctgtgcttcaacggcggcagcattccgggcaaaacgcctgcggaatatgttgcttacattgaagatatgcgccgcagcttcacactgctggacgacgccatcgccgccgtcaatgacatgacggagaacagcgacagccttgacggtatccgcgtcaaggctgttttctacgccattttctttggagaggacacaccgagccgtcgagcgcaccgacagttcgtggactgcttcgtgacctacgaggaacgtacccgcaccgtcaccgatgaggacgggacggaaaccgaggagagctacaccgtggcgattcctgttgcggacatagccgccgtgtacggcaaacttgaaaacgtgcttcacttacagctctccgaggaacagaagtccaacgccgacagtgtgtacaatctggcgcgctatggcgttgccggaggttcagatggctggatacccggcgcggatgtgccgtacattggcgcggacggcttctgttcacccatcggttcgggctgggagcgccgtgtcacctccgaattcggcaaccgcatcgatcccatcaccgggaagcgcaaggggcacaccggcatggacctggctgttcccgccggcacgcccatccgcgccgcgctgccggggacggtaacggtctccaagtacaatgccggaggctacggctattatgtgatgatcgaccacggcaacgggctcaccacgctgtacggccactgctccaagctgctggcaaaagtgggacagacggtggagacgggagacatcatcgccctctccggcagcaccgggcgttcaaccgggccgcacctccacttcgaggtgcgcgtcaacggggagcgaacgaatccgagaacgtatttgccgaaaggctgaaaggaaggaaatgattatgaatataacagcaacgcaaatcacgccggagcgtgagcgagagctggtggagcagctcgtagattttctcagcagccgctatgacgctgggaatctctatgacatcctgcgtcacgggctcggcatggatcacagcgacatggaggcgctgggcttccaactccgcgactactacgaggaggtatgatcatgaaaaaggaaaatgtcacgatcccattcgagagtgagcagcttgccgctctcgaattttcgctcaaaaaaaagaacaccagcgtgcaggcgcagttggaagaactgctcaaatgtctctacgaatccgaggtgccggagccggtacgggaatatctcgccagccgcgcggcgcccgctgcccgtccccgccgtccggcaagaccggcgaagccgcagatgcgggtggagtctccctctgcattggaacagcctgtcggcgaaagggctggtgactgagatggcggatcatgtagacatcacactgtggatcgaccggcgatggaaggatgccattgagaagcatctcagggatgaaaccctggaggagcatctggaagatgtgctggatgaaatttgcaaccagctcccagaacgtgagtataaacgcatcagtgccgagatctacgcagaggatgccgcgcggcgcacggaggaagaagcggcccgcacctacgccgcctaccatgtggtagaaaacggacaggagtggtacttcaagaccacgcccggtgaggagctgctggatgccgcggaaaagctgcgcggctatgtcaccgcagagaaaggcactgtaccggatctgttcatcaaaatgtttgcggacggccgccccatcacagcgcaggagtacaacgcgctcactgcccttcgcatggagaacaccggcaaggtgcgcggcgtgttcgatgtgaacttcgacaagcgggagttctccgctgtccacatcatggacggctggcggacctgggcgatgcaggatatgtcagcggcggtgtaccatgccacacggtcgcaattcgcgtcgagcgatgatcagtggcgcaagctgctggatcatctgagcggtaaagagatcacctcggcgggacatctctccgcgcgaaatttctctttcggtgatgagatcatcgaatcggacggcaagctcaatttttatgtacagacggagttcgatgtggacgctgccttcggtacattcgtcctgaccgatgaaaatgatgattggctcaatgtctacgccaactacaatatcgcacagggcaagccctgtaacacgctggagctgacgctctgcaagggtgacggctccgaggagagttggagctaccagctcaacgccgcagagcaggatgtcctgctgcgcaagatggaggaatactgtcaacagcagaccggcatgagtctccacgactacgcgcagcaattccgcgaggaaccggaacagcaacaggggccggtgatgaagctgtaggtacaaacgcaggcacagcaaggctgaagcactcacggctgcggaaacaacagcgtccaggctgcgcgtgcctgcggacccgcggcgccgatgaactgcgtcaacccgcccttggcgggcagccgcagttcatcggctgttattctgctcccgcggtttttctccgtcccgaatttgaaagcgttttgcgcagatttttgtgctttcaaatgtgccgcgcagggcggctccccgtttccccgcaccgttcgccctgtgtgccgctgtgtgcgcgtttaagggctggggtggagtgtgtacccgccaaagcccattgaagcgagtgttgcggcgtttgtgggcgatgtgcgaaaaatctgtgtggatacggcttcgacgatggagaaacgagactttggggagtgtgtttttcctcctgaccacgccctgttccggaggttttcgtcccttatttgcccgttcgataaaagcactagataaagagaggtgcccgtgcgcgggcccctctcagccacaaagccccgcagtgcggggcttttttgaaggttcggcaaggtgcacctttggagcgtatttgcaaggcttgggtgaaccttaccggagaaaatgcaggcgcagcaagggattgcgccttttgagaaaggagaggcgtacagatgagtgaagtaacagaaaaacggatcgagcgaaccgtcgtttggctggatgcggggctcgttccgcgcatggacggatggctgaaggctgacaactgcaaaaaccgcagtgaatttatcaacaaagcgctgcgcttctacatgggctatctcggcacggaggacaacaccgcgtatctctcgaaggctatcctgacagccattcagggtacactggacgacaacaacaatcggctctgccgcattcttttcaagtgcgcggtggagctgaacatgatgtgccacaccatcgccgcgcactttcgtaccgatcctatccacacgcgggagttgcgcggctttgcggtggatgaggtgaagcgcaccaatggtcaggtgagttttgagagcgcagtgcatcagcagcgccgcattgagccggaggatgaatggcccggatcgtactgatctcgccctacctcaagggcggacagaatgccgcgaagctcgcgcagcgtacccgctacgtcgccacccgtcccggcgtggaactgctggcggatgagcgcagtacactccccgccacaaaaaagcagcaggaattcatcgcacggctgctgaagtccttcccatcctgttgggagctcattgagtacgaggaatatctggatcgccccacccagggcagcgcctcggcgttcatccagcaggtgcaggaaaactacatagaggttctggatcaaaaggagaatttcatcgactacatctcccaccgtcccggcgtccagaaggacggcgagcacgggctgtgggacgctcacggtaaggtacaaaatctcgcgcaggcggtacgggaggtggcggagcacaccggaaatgtgtggacgccggtggtggcgctgcgccgtgaggacgcggagcggctgggctatgacagcgcggaaaactggcaggctctggtgaacgcctccatctgcgatatcgcaaatgcgtataagatccgaccggaaaacctgcgttggtacgctgcgttccaccagaagccaaatcaggtgcatatccacatgatcatcttctccgcagatccaaaggagggctacctcaccaaagagggtatccgggaaatgaaatccgtcttcgccagacggatctaccacgcggatcggatgcacatctaccagcaaaaggataccgcgcggcaggagttgcaggcgcagacccgcagggccatggtagagtgcatcgtgcagctggagcatggcgtagtggataacccgcgtctggagcagctcaccgaggagctggcggaacgtctgctgacgatcaagggccgaaaggtctacggctacctgccgccaagggtcaaggccatcgtggatgcaatcgtggaggagctggcgaaggacgagcgggtgtccgccgcctacgaaacgtggcagacgctctacgagcaggtgtgcctggactacgatcagcggccgcgcaagcgtctgccgttctcccagcaaaaggagttccggagcgtccgcaacatgatcattcaagaaacactgcaatggatagcagagcggcagcggtacgcggatgcgctgagaacaccttccgcgcaggaaggacctatcatcaaaaaggatgccgcagaagctgcgccaaagaactctgagatcacggcatctctcgcgtcggcgcagcccaaatctgaccgtgcggcgagtgccacgccagaagattccgcctcctctgatgatgccgcatctaagggcaccacgccacctgcggttggagatgcaccggctttttctcagcagtcagttcaccctgatcagcaaaaagagagcgcaccggcaggagcggattaccatgcccccacggtgggcgaagccgtcgtgcggatgctgcaccacatgagcaggatcttcgaggacaacagcaagatcgaccagatccaccgcggcttgcagatcgaccgcaagcgccgtcaggaattgcggcgcaagcgtctggcaatggggcacaagccggacgaccatgaggagcaaacattcagatagcgcaaagcagaattatgaaaggacatgtcatgagccaatttatctatttcacgccagaggaaaaggcgcaggcgcagaacacggatctcgtgtcgctgctgcgcgcccagggggaacgacctgtgcgctccggccgggagttccgtccccccaacgatcccagcatcaccgtgcggggcaacaaatggttcgaccactccgcgcgcgtcggcggctacgccgtcagcttcgtccagcgctattaccgcctcccttatcaggaggcggttttgcttttgctgggcaagaaaaataacaaaacgtatgagcaggcaaagcccgcaaaggaggctccgaagcccttcgctctgccggaaccttacggaaccatgcggcgtatgtatgcctacctcatgcgtcagcgccacattgaccgcgaggttatttccgccttcgtacatgaaaagctgctctacgaggacaggcatcacaactgtgttttcgtggggctggatgacagcggtgaggccaagcacgcgcacatccgcagtaccaacagcgagggacgggtgttccgcatgaacattgagggcagcgcaagtgagcactgcttccacaaaaacgggaccgacaagtccctctatgtgttcgaggctcctatcgaccttctgtcccacattaccctctatccctacggctggcaggagcacagctacgttgcctgctgcgggctctccatccagccggtgctggagcggctgcggcagaatccgaagctggacatggtgtacctgtgcctcgacaacgatgacgcgggcaacgatgcctgcgaccgcatgatggatacgctggaggagatgggcttggatgtggagcggctctacccggtgcgcaaggattggaatgacgatctctgcgctaaattcgagaagaaggagaaagacacatgaacgaaaatgtatggcccctgattttgcttggcggcggactgctggcattcttgctcgtggtgtccttcctctccaagaattattctctcaacaatttcaagagcaaaaccgttggcgacggtcagcacggcacagcccggtgggcaacgcccagggagatccacacgacctatcatgtggtcccgttccgtccccgccgctggcgcaagggagaggagcttcccacggtacagggcatcattctcggcagcgtcggtggcagaaaccataaaagcgagggaggattcctgctgaaaacctctcgcaagctgctggaaaagctgcgacgtcctgtggagggaaagcggaagacgaagaaaaaatcaaaggctctctcaaaagtcaaaaagatgattgaggagcagcgagatatccgggcgctggtggacagtgatgacgtccactgtctgatgattggcgcctccggcgtgggcaagacggcattttttctatacccgaatctcgaatacacctgcgcctgcggcatgagctatttggcgctcgacaccaagggcgacctcgcacgtaactacggctgcatcgcatcgaaatattacggctatcaggtcacggtcattgacctgcgcaatccgacatgctcggacggtttcaattttatgacgctcgtgaaccactatatggacagagcaaaaagagaccccaacgatctcactgccaaggcgaaagcagagaactatgccaagatcctcgccaaaacaatcatcagtccggaaggctcctcgcaatatggcgacaacgcctttttctatgagagcgcagagggtgtgctggccgccatcgtcatgctgcttgcggaatttatcctgccggaaaaggacggcacagagaagcgccacatcgtttcggcgttcaagctggtgcaagatctgctggcagcgccgggcggcggacggggaaagaacggatttcatgtgttgatggacatgctcccgtctgtacataaggcacgctgggtggcgggcgcggcgctgacggcggcggatcaggcgatggcatccgtcatgtcgacggtactttcaaagctcaatgcctttttggactcggagctcgagcaggtcatctgccgcgataaccctatcgacgcagaacgttttgcgtcgagcaaatgcgccatctttgttgtcattcccgaagaagaccccacgaagaatttcatcgccagtctcatgatccaaaacctctcgcgcgagctcttctccgtagcggatgaaaacagaggaaggctcaaaaaccgcgtggtcatttacgcggatgaatttggtacgatgccgccctttgacgtgctgtcgttgttttctgccggacgttcccgaggtctgacgctagtgcccatcatccagagccttgcccaactggaaaagaactacggaaaagagggcgcggaaatcgtgtgtgacaactgccaggacactatctttggcggctttgcaccgcagagcaagacagcggaggcgctctcctcggcgctgggcagccggacagtgctgtccggctccgtcagtcagggcaaggagagcagccagtcgctccagatgatagagcgccctcttatgacgccggacgagctcaagtccgttcccaagggagaatttgttgtgatgaagacgggcgcgcacccaatgcgtacacgcctacgattgtttcttgactggggtattacctttgaaaaagactgtccgacgccgaagccggtcgtccgcagagttgcctatgcgggctgcgaggaactgatagcgaacattcgcaaacaatacgctgcggagaagacgccctacaatgcaatgcggggtgataaaagatgagcgattttaattttatttacgccgaggagcatctgagtcaccgggaaaaggcggtatatatctatcttcgggaccgggcaaacgtttccggtgtctgctggccggggatcaagaccatcgcccgagaattggaactttcgccgcggacagtccagcgggctctggcagatttggagcgcaggcagctcattgagaagcagaaccgccaccgctccaacggcagtctcacgagcaatttatatcggctgacaaagcacaaaacgtcacagcctcccgccaaggggggactgtgacgttttccctttcaaaattctgtccatagggtagcgtcaccatggcgcatccagaagagcctactctaccggaggatacaggacagagaaagaacaagaatatggaggaacttatgaagatgatcgttagaagaacagcgttggctgtctgcacccttgccctggcattgatcctgcccacagccgcttccgctgcctgcacaggctttgatgacgtactggagtctgcggactgctatgaaagcgtgatatatctggcagaatgtgagatcgctgccggaacgggaaatgactgcttctcgccggaacagctcatcactgtggagcagtgggctgtcatgctctgccgcgcctatggtgcggaaactatcggtgacagctggcaggatgtaggtcgaagcagcgtcgtggaagcctactggcagggctggctgaacgaaaccgcactctccgcgcccaatatccagctatgccggggagcgttgctcaaaagcgcctttgccgcagccaagatccccgtttacgacagcgtactctatgcgggcggcgtgtcgctgcccgattatgaaaactgcatccgcatcgggaaggagcttcagctctgcggcgaggcgaacactgcaaatgagatcgttacccgcagggacgttgccatgctccttcacgccattctgacccgcgccttcaccgtggaggctccgcccgcgccggtggctctggtaaacgcggcaggcgtcaacatcaatgactacctggtggcgctgcggcaggtgccggagccgatgcttgccgcctttaacgccgccggctggacataccgtatcgacttcgactacatcagcgaactcagcaagcagctgaacatgagctgcattggagccaccaactacagccagaaaaccatctacatctcagaggccagcgcgacgctccacgaattcggacattttctcgattggacgcggggattccccgcagagcatgaacagctctttcgtgcagaagctgccgccgcgccgctgcggaactatgccaaaaccaatgccagagaatacttcgcagactgctttgcctactgcatcatccacggcaacgattcggaaatgatggagagccttagaaaaaatgcaccgcagacctgtacatatttcgaggaattggaaaagacagttggagcagaagcattcgttccaaatgacatagcgaacatattctgaaatccttcaagggtttgatatccccgcacatctgttatagaatggaacgaaaaccggtctgggtgaagaaatgagatcttgctggtcgtattgctttttatgttgggacagcaatacgacagcggagaacagggaatcttccaaaattcccgataaaaattcttgctttgatgtagtatttcgccccgatttgcgaggtaataaatagaagggtgtgattccttgtggatgatattaagatcattgatttgttctttgcacgttctgagcttgcaatcgaagcgctggacggcaaatatggggcgatttgccataatctttctcgcagcattttgaaggatcaacaggacgcagaggaatgcgtgaatgatgcctatctcggcgtttggaatgcgattccgccgcacaggcctaatccgctggttgcatttgtttgtaaacttgttcggaatatttctatcatgcgttatcgggccaatacagctctcaagcgaaacagcaattacgacttgacaatggaggaattggaaaattgtctttcttcctcagtctagattgaagactctctcgaggaaaaagagttgatttcgatcattgaagattttctcaggggcctatcacaggaaaaccgtgtgattttcctgcggcgctactggttctccgatagctatgcagaaatcgcagctcgaaccggtctgacggaaaagaacgtctctgtccggctttcccgaatccgtaagcaattacaaacacatcttgcagaaaggggggttttggcttgttgacattggctcagaaattctccagcgcaatgaatgggatcgacgatgagttcatcgaagaggcgctgacctatgaacggtccaaaaagcgcaagccttcccgcgtactgcgaatcgtcctcgtcgcggcgctcatctccgtgcttttgttcacatcggcgttggcgctttccccgtcgttccgcgtaaacacgttgaatgccctgattgaaattttctccgaccacttaacgatcagctttgacggagaggaggcacccttatcccgcaccgccggtaagatcgactgctccacgttggaagggacctatcgcattcctccggagcacagcaatcgggccagctttttcaacagcgtccgacttttcggcagcagcggtgaggaaattggcatcaatgtcaccgtcatctcgcaaaccttagtaggagactatgacatcgctgacgacgccgagtcaaagtccatcacgctttacggcaaggatgctacgctctactggggtgagggccaaaattacgcgggagaaaccggtacaaaagctgccatcatccagatcgacgaagaaaacggttggatcgtttacttctggagccgcgggctctcgccggacgagcttgtctccgtcgcggaacaggtcaaaatcacatagtccgcttacattgcgtgcaatgagcaaatccttacactcaatgttatcggtgcaatgagttatcaggaatggcagtatcaaacatcacacggcatatcgaccacattggcgtttggccctggcagagcactaattctgtctgatttgccggacagctttatgaccatcattattttggcgggaagtgccgacggcttgacgcgggatctgcttgaagaactggctgacagcttcgatctttcaaagctcactccgatagtgctgccggaatctctctacatcccatcaccttaattttcatttcagaatatgcaggaggccttttatcatgcgccaaatttcgagactttcggtcatcgctgtaactactgctctccttataacactaagttcatgcggcagcacacagagcacgctggaagccgatgaccagccgtccactccaatagaaaatagagaaatgacaaccgatgtgcaggagaacaaagccaatggcgattctccgcagggatctgtcaccgatgccgcaaactttgaaataacggaaaacgaggatggcacagttaccattagccggtatatcggtactgaaacagatattgtgattccctcacagatcggcggaaaaactgtttccgcgattggaaacgtcatgggtacgacgggagcgtttgaaggctgcacgagcataaccgccgtggtgattccggatggtgtgacggaaattcaggacaacgccttttacggctgcacttcgttggagacggtgacgatcccttccagcgttacactcctgcgcaactgtgctttttgcgactgtccaaacttgcgtgcggtctacttcaagggcgatgcaccgcagcaagccaattatgtatttgattccaccgaaaatgtcaccatgtattatcaggacgggacctccggctgggtgaatccctggcacggacgtcctgcggaagtatatatccccgaataaaaagtgcaagggccatgctcaaatctaacatcaagaggacaagcaccatgatgaaacgtctatttcccaccgcgcttgcggtattgctcctgctgcttgcaggctgtacagcaaagccggatacatccgatcaatcgaagcccgcggagtattatttgaccgataccgaccttccgctggatgatgctgcgcggcttcgcgccgcgccggatttcctgacggcggaacagcaaacactttacaggcaggcgtttgcgctctatagcgcgatgtttgacggtgaaacgaccggcatcgacgacgccttccccgccgcaggcggccaaaccgagtacgacgagtacacgccggatggctccgactatacctacatcagctcccacagccgttggcagtcctgggctgactttgatcgagtagtccacgcgctgttcaccgatacgttctggtctacctgcaatgacgacggcaacgcaccgatctacatcgagcacgacggtcggctttttatcctcgactgcgcctacggcgaccaatattacaacagcaacattcccgacgaatttactctgactgcacagacggatgatcgtatcgacttcacggtgacggcgcactactcttatccctatcctcgtcaggacgaaaccgaggccgagcgcgacgatcggctggaaacaagctatgagtacacgcgcacctatccggtcactctgatctatactgacgcaggctggcgttttgatgcgttcaccacgccgaatcaggcagatatgcagctcctcggcgagtgggacggtgtagaggaaactgatttctatttgccaaataattaaataacctttccctcccgtgcctgtgaggcttaatacactatcttccagatgggacatagcaattccggagcaaaccaaagtagaagaatactatagctccgatcatggcttccacggtgatggattcgctgcagaagttattcagacagacactatccctgatgaccgatacaagaggagaaatgtccgctattatcttgaatacggaatgattgagtcttccacattcagcagtgaattcggttcagaaaccgtctatgacggcttttactactccggcgaggatgttccgtgcgggttccaggggacaagtatgagctttcaatttgacggcggcggttggagttggcatgaatctgacggagataactttgagtacactgaaaagattctcgggaaagcgtactggtatcgtatgcacttttgaaaagcaaaaataataggttctacagctgtagattttccaaaactgattgaagaccttctaaatgcggagtaggaaactgtaacatcgctgacgataccgagtcaaagtccatcacgcttttctgcaaggacgctacgctctactggggtgaagctcgggattatgcggtagaaaccggtacaaaagctaccatccttcaggccaacgaagaaaacggttggatcatttacttcctgagcttcaacctctcgtcggacgaacctgtctccgtcgcggaacaggtcaaaatcgcataaacaaattacgcagattagtaccaaaaggagataacgacaatgaaaagagaggcaaagagacagaaaacctcattcacgattgtccgaaccctgttaatcatcgttatggcgctcgcggccgcagcggccaccctgcacatcgtcaaggaatcctttcgtcccactgcgaccgaatctcccgatgacggcgagagctccaacattttcgatcaggagacgcacagcgagggtgacccattaagcgcgaacgcctcgagccgcagggagcgaaaagaaaattgttatacttttctggttgccgccagtgatcagagtagcggaaatgccgacgtcatcatggtcgtcatgtatgatgcagaaaatcaaaacgtcggcattgtttcaatcccgcgagatacgctcgttgatccttcttccgtgtcgtcccgatttcctaagatcaactcgacctatctgcatggcgtcgaatcgctgcaatcgaccgtcgaggatatgctggggatcccgctcgattattacatgactttcgacacgtccggttttgtcgagctcatcgacaccatcggcgggatcgactttgacgttcccgtacacatgtcctatgacgatcccacgcaggacctctcgatccatttcgagcccggcctccagcatctggacggaagggatgcgcttcgcgtctgccgcctgagatacaacaatgacgggaccctggcctaccccgactacgacattggccggacacggacgcagcaggggattatcaaggccgccatcaaaaaggcgctttcccagccgtggaagttcaaggagtatctcgacattttcagtagctattgcagcaccgatctgagtctggggaatctcctgtggctcgcagactctgccaagaatctcgacactgataaaattcaatcagaaaccctccccggcaacggtgaagttacttgtaagaacgtcaaatattgctatcaactctatgtcgacgataccgctgacattgtgaatcggcttgtcaatccgtacctcacagagtgcacaaaacagaatctcaacattttcactgtgaaatagggaataaatgaactatagaggtctcttttttctgtttggccagcacaatcttacgtgcatttccctttcatccagattatgtatctggtcttttgcacataacagaatacacacattaggctatcttaaaaacagcgattatatggaggagaatacaaatgcagcattacctaaaagcattgaagcgaaagaagtctctgctcttttctgtagggatcgtcatgcttctggtactcacattctatttgagcggatgctcgggaaaaaacgaagtacaagaccaaccgaataaagtggatactgtcccgaatcaggcggcatcatctgaggaaccatcctcaattctctatgtgaatcatcagttggggttttctatggagatgccgctgaattggatggggcaagttgaagttgaagaagaatatgggcttcaccaccaaaacggagggaattgtattactttttatcacaagccaacccatgataatggcgagggcggcattcttttctttattgactgctaccccggcgaatggagcgaggacaacccgccggtcattgcaggacacagcgttgttgtcgcgcaaacggaaaactatacctatctgctcagaacgccgagtgatgtcgaatatagcgaatcagatcctatgctggcagaagcctatcagtctcttattgcacagcaagactttattatctcccatatctatgcaaccggtcagaccgtgatctcgccgaacgagtaagcgaatattaaacgaagtccttgctctatcggttccagtgagccttttcagttcgcagcgttacaataagttaggaggaacgaacatgaagtatcctgtgatattcaaaaccttttccgtgcttttctcattgcagtcagatgaacgatggatcgtccccatctttgggggaacaatcatcctgctgcttgcgttttctgcgtggcggctgtgtacggagaaaaaggacaagtggcgttaccgcagaatgatgctgctttcgctgatcctatggggagttggagaacttctgtggcaggtcaatgtgtcgcagataatgataatttcctcgattttagcctttgcttcgatgtggctgtttatatgtcaagcggtggtgtatgtcgtatacaaggggtatggggcactaaagcagttacccgcgaagaagctacagagaggagatactacgtgaaagctcaaagaggaaaaatcatcgttctgtgtctttgccttatttttgcaatgctgatcatatcgggaaaggcctccaaacttgggacctacctgtatgtccgatgcaactatacgcatcttgaagaattcgctgcagaagttattcagacaggggctatccctgatgaccgatataagaggagagatgtccgttattatcctgaatacgggatgattgagttttccacattcagcagcggattcggttcagaaaccgtctatgaaggcttttactactccgatgaggatgttccgtacgggttccaggggacaagcatgagctttcaatctgacggcggcggttggagctggcatgaatccgatggagataacttcgagtacacggaaaaaatcctcgggaaatggtactggtatcgtatgcatttttgaaaagtatctctggtgaaacttcgtgaaaaaacaaagaattatcttttttgttatctcttttatagcgataggctatgtttggatatttgcgcaatctgaaaaaatacagtgcactcctaatctggatgagaatgctattgtcatccgatccaagaatatgtgtatatctaatgtgacaacgaaatttggtaatcttgccttatcgtctatggattaccggagctgccacctcaacattgttgaatacgggacagaatacgttcgcattgattatacaaataaacaaaagcaacaaaaatttacagttttcgagattgttgtttctccatataatcttgtggttatatcgcaatttgatgaagtaggcaatcaaatcaacttctctacatactgagataaaaggcctggatatttgagtaccgcaatcttcaatgcagataccattagtaacgaccattcgccgtctctgcagtatcaaaggcggcgataagcacgattgcttaccgccgcctaatttatgccgctattatttctttgcgagctcgtcggcgtccttacagagccgtatgtatttagccgcttcctcggcgctcattccggcaaagaacgtcctgacgcaggacgggacatcgcctttcggcacgatcccaaccagcgcatcgatgctgattcctaaagagcgtgaaaaatgtgcgactgtatccagctttggattagtctttcctcgctccaggtcggaaatgctgcggtccgtcgtcccgagcttttcggccaattcgatttgtgtcaggcccagttcgcgccgcgccctgctcagggcagctccaaaaagattgcaaatatcgtgcataccttcaccctttcctattgctttcattctaatttgaacttcacttctaatgaacgctgtttggcttcaagatattagaagtgcggttctaattacttgcagaaatagcgaggtattttatgaacagggagaatctgcgggaggtcctgtaataaaagattccggcgtttgaacttccatataggtcctcaggctggaagaacacgccggacaccacacaggaatacggtcagaaattagaagtaaacttctgctttgcggagccgggcttcttctgtaattatattgataaaagtgcaagcgttcagctgcggctgtacgcttgcacttttcttatccagtggcgatcacgtcctgactgccgctgccgagatccaccgtttctgaaattttgtccatttcaaaattttcagaacacggaggactcaaatatgaaaaaacgagatgcctatcatcccgactatttgaaaatatacccctgtctgaaggaccgtccggatattttgaaattcctgagacagtgcgaccgaaagcaggagtatctggaatacgatttgaaagtaaatcgtattcgcaagagcgagcggacgatggaaaccgtggtcatgccgcagaaagaggactcctatgaacggctcttggaggagcatcagcagttctcccagcaagccccctccccggaggaagctctgctccatgaaatagagctggaaaatctgcgatgcgcggtggagcagctgtcggatgatgagaaatttctcctccatctgcgttattggtgcgagctcagtcaggtggagatcgctcggcagctcggcacaacgcagcagagcgtcagctatcaggagcggtgcgttttgagaaaattaaaaaaacttctgaaaaattgaaaattctttttgtagaaatgcgtccgtggcgggtacttaagtgaagggatcaaatactcttctccctgccggacgaatcggcgggttttgctctttgaaaaacgccgagataacagcggccatatccggtgacgaataacgtcagctgacggtcccctgacgagggggaacagcgatgcggcgggtgcgccaagaccacctgcatcggacaagcttccgatgccaatgaacggccttttaaggtgccaagcgaaactcacccagccaaaagcaggcgtggcggcctgtcttgcaatgatcccgtcagtctataatggtacatcctgtccagccacagtctcaagcgatgggggcagctcggagagatcctcggaggggtgagattcccgatgggcgctgccaggcgccggttcgttcaaccgcccgacagtccgggaagtagtgtcgaataggactgagcaaagacaaatttcagaaacggccagggccgctctgccattcagggcaatgtaagatgctgccaacaaacagcagagcggccctcgctttccacaatatcccagcaaaaagtttgtcaggaacgcttgttcgatttttgccgatgtggtatactgcttatcagtaaaagcgaggaggtacgccatgcagcggacgtatatcgccattgacttaaaatcgtattatgcgtctgtcgagtgcatggagcgcggccttgacccgatgacgaccaatctggttgtggcagacctcagccgcacggagaaaaccatttgtctcgcggtatcgccttctctgaaggcatacggaatccccggcagagcgcggcttttcgaagtggttgagcgcgtcaaggaggtcaacgccgaacggcggcgcaaagcaggcggcaatctttttgaaaagagctgcgatgcccacgaactggcgactgacccgtcgcgcgcggtgggttatcttgtcgcgccgccacagatggcgaaatacattcagatcagcacgcagatctacaacgtctaccttaaatacatcgcgcccgaggatatccacgtctattccattgacgaggtgatgatggacgtgaccagctacctcgagacgtatcacatgaccgcccgcgagttggcaaagaccatgatcctcgatgtgctgcacaccacgggcatcacagccacggcgggcgtcggaacgaatctctacctctgcaaggtcgccatggacatcatggcgaagcacgtcgcgccggatgaaaatggcgtccgcatcgcggagcttgacgaaatgagctaccgcaggcagctctgggcgcaccgtccgctgacggacttttggcgcgtcggaaggggttacgccaaaaagctcgaggccatcggtatctacaccatgggcgacattgcaaaatgctccatcggcaagccgagcgaatactacaacgaagagctgctctaccagatgttcggcatcaacgcagagctgctcatcgaccacgcctggggctgggagacatgccggatggaagacatcaaagcgtaccggccggagacaaacagcatcagctccgggcaggttttgcagtgtccgtactcttatgataaagcacgccttgtcgtgcgcgaaatggcagaggccgtcgcaatggacctgcttgaaaaacgcttcgtaactgaccagctcacgctgacggtcggctacgacattgaaaacaccgcaggcggcaatttccgcggcgagatcgtgacggaccgctacggcaggaagattcccaaacacgcacacggtacagcgaatttaccgcgcaagacgtcctctgcgcgcagcatcatggatgccgttctcagcatttatgacgaaaaggtcaaccccaagctgtccattcgcaggatcaccatcacggcgaacaagatcgtgagcgaggacgatgtcccgcaggaagtggaaacgccggtgcagtttgacctgttcgacgatatcgcggcgcaggaacagcagcccaaggacgaggaaatcagattggagcgcgagcgcaaaatacaggaagcgatgctgggcatcaagaagaagttcggcaagaacgccattttgaacggtgggagttacctagacggcgcgaccgcccgagagcgcaacggccagatcggagggcacaaggcatgagcggcaaatacgacgatatcattgagctcccgcatccgacctcgcagaaccacccacgcatgtcgctgcatgaccgcgcggcgcagttttctcctttcgccgccctcaccggccaccacgccgccatcgcggaaatgggacggctgacggatcggcgcatcgagcttgatgagagcgagatcgcgcgcgtcgacgcagaattgcagcaccttcaagaactgctcccggagaggccaacggtgtccatcacctacttcgtgccggatgagaggaaaaatggcgggagctaccagaccgtcaccggcgaggtcaagcgcatcgacgcggtcgctggggtgatccagatgacggaccggagagagataccaatcgaggatgttttcagcgttgcagttgatgtagtgtgatttgatgcgtagaacattttaaggaggttgtgtaatgcttagcccagatttacctatcgcaaagttggaggaagacgaactgaaccgaggctcatttgcggagagccttgcaaagactttagtgcagtattcgttcccgtcgtctctcacgattggcttatatggcgagtgggggagcggtaagacgtcactgctgaatatggtctttgaaaatgtggagcgtatcgatgacagtgtagtggttctgcggtttaatccgtggttgtgctcagatcccaagcaacttgttactcaattctttaagcaaatggcaacagcaatcaagctcaaaaaaagcatcactgataaagcgtgggagctgatcgatcaatacgcagatatattgggggcaacgagcgttattccggttgcaggagaaattgttgctgcctttacaaaagtgcttactaagaaggcggtggaagaaaccaaagaacggacgaatgacttgcaggagagcaaaaatcagattatcaaaaagctaagagacgaaaagataaagattattgtttccatcgacgatatagatcgactttctgaggaagagatcgtagcagttttccagttggtcaaatcattggcagattttccaaatactatatatgtcttagcttttgattatgatgttgtggttcgtgcgctcgggaaagtgcagcatggtgatggcaaggaatatttagagaaaatcgttcaagtgccgtttgagattccagcgccgaatattgatgatatccatgaagcgcttttttcaaagttaaatgggattctcggtgatattccggaagaggattgggacaaggagacatgggccgaattgttccagcagggaatcaaaaactacatcagatcgatacgagatgtgattcggtacacgaatgtattctctctcaaatatgagcttttgaagaatgagacaagtgcggctgatttgctggggcttacatgtttgcaagtatttgagccgacagtttactcgaagctgccgagttataaggatatattatgcggagagaagcgcagcttctcacatgagcgacaaaaagagacggaggagaaagtcgaatgtgcgattaacagaatagccccggatgacggaagtgttacagatttagaagcaacaaagaatatacttggtactctattcccgggaattaaaacgaatatggggtggtcgtacggcgttgggagaggatactcccgtagagattcccttataagaaatagtatcgctgctccagaatgcttcgacaggtactttgcgttgacgcttgagaatggagcgattcccactgctacagttagacgtatggtttttgaatcgagtgaaagtgagcttgcagaagaaattatgcaaatctatcgcgatgggaaaatcgtgcgccttcttgaagcgatagaggtgtacgcaggggccggaaacggacgaagcattgacgcggaaagggcagctataattatcaaagttctttcttgcaattggagttcctttgaggttgaggatgagggcttttttgcagttccgtttgcatggaggcttttgtattgtgttgatccgttattaaaaaggatggattcggaagcaagagcttctttgatgtgctcaatttttgaaaacgaaaaggttcaggtatcgacagtggctttgttgctgcaagacttcgaaaaccagcttggccgatgtgcagaaaatgccagagagtctgctgatgcagtattgccgcttgatgcggtcctaaagctggaagcaatctttaaggagcgcgctgtgaaggcaattgattcaaaagtggtattgaggcaatatcacgggctgagatttttgtggctgcttgaacagatcgctccagaggtcgctgcggataaaaagaaatcaatggttacagataatgtttcccttgtgaagattatagatgaatgtacttcttgcggaagtgtagcggtgagaatagttgcgaaaacgagaacggtggatcaagatagacttagcgagtttgttgatctcggcgaggcgtaccagcgagttaagaagtttgcgacagaaaatcaattctttgatcttcctcgagatgagcagatgagcgctatagcatttatcctcattgtggaaagaggttccgttgagtcatcattgaaggactgcatagcagaggacgccatcatgaaggccttagatcagatgaaaaacaaaatagagacagatgatacgcagcgagactaaaagtaaggcggcatagtagtaacgatagaagtgtgtagtgagaacacccaagcccatttgaaaaacgggcttgggtgttttcattaccaaaatcaaaaaaggaggacttaaaatgaatcccaacgcagattatctcggcatcgtcgccctgcttcgcggtctgcaggagtatgggctcatcagcaacagcgaagcaaaaaagattgctgctcggttgaaagtgaggctcggcgcggacatcattatttctctctgatttctcactttttggtatagctattgcggatgcttcgtggtattgtgtgttgctgaaaaaggaggtggcaacaaatgagcggcacagaaaagaccaacggttccatggcgctgaccccgcggatcatcactataccggcaaaagaaccggaaaggacacggaagctccgcgtggcagcctacacccgcgtcagctccaactcaagagatcaactgcactcctttgtcgtgcagaatgcgtactactcaaagctcatcaccgataacccggagtgggagttcgttgacgtctatgcggacaaaggcatcaccggtacttcggtcgaaaagcgagatgatttcctgcggatgatggaagactgtcgacgaggcaggatcgaccgaatccttgtaaaatcttccacgcgctttgcccgcaatacaaaggaaagtctggaagcggtgcgcgagctcgcggcgatgggggtcagcgtctacttcgaagagcagaatatcgatactgccaagatggacggcgaggtgctgacagctctgtatgcggccatggcacagcggggaagcgaagccatctcgtcccgaatgcattggagctatcacacgcgcatatttgatggcggattttctacatgcaaggctccgtatggatatcggctggtggacggccgccttgagatcagagaagatgaagcggcggtgatccggctgatttttcaacgatatctcgagggatgcggaatgagtcgcattgcagaggaaattacgaaattagggtgtcagacgcgagatcataccccatattggcagtacagtacgatacaatatatccttcagaacgagaagtacatgggagactcgcttgcgcagaaaacgtacacaacgcggagtctgccgtttcagcagcgagacaataaaggaaaactgacgcaggtgctgcgcaaggacgtgcatccggctatcgtcggcagagaagagttttccagagtgcaggagctgataaggtttcgaaacgcaaagaggcgcgttgagccgaaagaggaggagacctttgcgggaaaaattgtgtgtggacagtgtggctcgcagttcaaacgaaagaagtgcagagggagtgtgtactgggtctgccgccgccacgatgaggccgctgcaaagtgtgctgtaagacaaatagaagaacagaccttggaggaagtaagcctttacctgtactataatctgaagcattacggaccggaaatccttgcacagcttatcgccgacctgcgcagcattaaaggcggcagtctcctctggagcgaaggaatcgttgagatcaacaaacaaatatcggacattgcctgtcaggaacgactactggcccagctcaagcagcagggcgtagttgatcctgacatttttatatcccgagctgatcttctggctgagcgccgcagggagctgaagcggaagaaagaacggatcatacaggcagaagaggacgacaccattcagagaacagagcaaatgctggacacgcttgaaagcggccctgactggttggagaccttcgatgaagagatattcaatgagctgatcgagaaaatcatggtcttagacaatgaaacactgcacttcaggcttctcaatggactggaaattccagaaaaaatagaaaggacaagaagataatgggaaatcgaaagcagccattcggctacaagatggagttcggcgaaatcgtaccgcagccgcaggaggcggaaacggtacagagcatctatcagctgtacctcgccggaacatccttcaatcagctcgctgagcagcttcagacggagggggtcccctatgatgcagacaagccgtggaacaaaaacatggtggcgcggatcttggaggacgaccgatacatcggcgggaaaaacttcccagcgctcattgaggctgagcggtttcatgccgtccaggaacacagaagaaagatgcgccctgagtgtaagcagacgccagcacagaaagagctgcgcagactttgcggcagcgcggtgcctgacagcgttgcacgaaaagtcctcaagatattaaatcaggtagtagataacccgcagctcatcaagatagaatcatccggcgtccccaccacggaagatatccggcaacgtcggctggaactggacaagctgctgcatacaccacctgtggatgaagaaatcgcgcggcaaaagacaatggagttagcggtactaacacttgtgcatgtcgagatggaggaatacgaagcccaccggctccgcagtatcttcgggaaacagacaaagatgcaggaactggatgcagatcttttgaagcagggggttcgcaaaattgagtgtcgcagtgatgatgtgcgcattattctgaaaaacaatcaagtcttggaggagcgtgatcctgcatgacacaaccacgccctgagccgaaggtcattatcatccctgcaaaagaggaaactccggaggagaaggagaaaaaacgaagtcttcgcgtcgctgcctattgtcgtgtctcgaccaataaaaaagagcagcttaccagctatgaaaaccagaaagcctactacacacaaaagatcatgaccacgccaaactggacgatggtagacatcttcgccgacgaaggtaagacgggaacctctacttgtaaacgtaaagacttcctgcgcatgatccgccagtgtaggcagggaaagatcgacctgatccttgccaagtccgtctcacgatttgcccgcaatacggtggatacgctgaactatacccgtgagctgcgcggccttggtatcccggtcatcttcgaggagcagaatatcaactccatctacccggagagtgagttatttatcacgatccatgcagccttcgcacagtcggaaagcgaatcggcttcctttcgcgtcaagtggggcaagcgaaaatctatggagaatatctgtgctaaaatctcttgcaaagctctgctcggctatatgaatggggaagatggtgcggtgctgattgagccggaagaggctgagaccgtcaggcgcatttatgagatgtatctggcggggaagagcctccgaaacatcaaagagatactggaaggggaggggcttgccaatggtataggaagaacagaatggacaatttcaaatctgagagccatcctgagcaatgaaaaatactgtggagatgtcctgttccaaaaaactttcatcgataactgtatcaacaaaaagacaatcaagaacacgggacagcttcccaagtgcttgatcagagatcaccacgaggccatcatcccgagagaacagtttaacgcggtgcagtttgagatggcgcggcgaagagcgcaagatagccgcacaaagaaaagcgcgcccacaggccttggaaaattcagcggaaaatatgcgctcagtgggctcgtgttctgcgctgaatgcgggacagcgtatcgcagagtggtgtggacgcagcacggcaagaaacgcgctgtatggcgctgtatgagcaggctggactacgggaagcgatactgcctgcactcgccgacgctggacgaagagccgctccagcaggcggtgctggcagctatcaacgcggcgatgtcgaatcatgaagcactggtggcgcagatcacagacgccatggagcaggagcttgcaccgatcccaggggagggcatgagccttggcgatattgaccgtgccacggaggaactcggtaagcaattcgataacctgctgcgggaggcgagcaacgcggtgaatacagaagagtatgctgaacgattccgcgcgatctccaacatgatagaagagctgaaacgccggaaagccaatatcttgcagatccggcaggaacaggagcagatcgagcgccgcgtgcatgcggcgaccgcagtgatgaacacgatcccttctgaactgacagagtgggatgacagcatcgtttatcagatgctcgaaaaggtcagtgtcctgtcgagagaaaagatccgcgtgacattccgcggtgggacggagatcgagcagacggtcgatcagccgaagaggagaaggtttgcatgatgcttgagtagatcgtgcagatctgctaagatccagcgggaaaggcagtaaaggaaagagcggtgcagcgccgctttttcctttgcggctttgaaatttatagattgccttgagccctacgtaagaaaatagtataataaaacatgtaatatactggcaggaaaggtggatgaccgaatcgaatgaggagcaagattatgttttcagcaattaagtcttttgccaaaagaaacagaggtctttttattttgttgatagtcgctgttaagctttgattggaggaattattatgaaaattagaatacccgatataggtgataaacagactttcattgaagataaacggtcaatagttttattaggtgctaatggagcaggaaaaacaagaatgagtgtgtggattgatgaaaataacccagaattaagtgtacatagaatttcggcacaaaaatcgcttgatatgccagaatacgtaagcccaactgaactaaaaaaggcagaggatcattttttatatggaactactaatgatgatagaggatggcttgaaaggtatggaaaaagacataatcgatgggggaataatcctgaaactcatatgttgaatgattatcagcctctcatggaatttttaatgacagaaaactttgaaaaaagtattgaatacagagaaaaacacaaggaaggtaatcaagagtttgataatgagacgaaattggaaaagataaagaaaatatgggaaagggtgataacacacagaaggttacaaatatctgctggaaagattgaagttgaaagtatagagggtaattcggataaatataatggtaatgctatgagtgatggcgaaagagcaatttttcattatattgctgaagtagtttcagcaaaagataactctttaattattatagatgaacctgagaatcatttacataattcaatattagaaaggctttggaatgagatagaggctgaaagacaggattgtgtatacttatacataacgcataatttggattttgctagaactaggaataatacacaaattgtttggataaaaaatatgattgacaaacaaaagtgggattatgaattattagattcaaatgatttttcggatgatttattacttgagatattaggtaataggcatggagtattgtttgtagaaggaacaccggataaaagtattgatcgaaaattgtatgctaggttattttcccaatataacattatgcctttagaggggtgcgcgtcagttatacaagcaacaaaagcatataacaaattgccaatgttacattacaagacaataaaaggaattgttgatagagatagaagaactgaagaggagataaactcgttattgcaagacaaagtatatgtaccttctgttgcggagatcgaaaatttatttttgattccacaagttattgaactggttgctaggaagcaaagtgttgagaatgtagatgttttgttagaacaaacaaaagaaaaaacaatagaatttttgaagtcacatttagaagaacaagcattgctgtttacaaagaaaaggtgccaaaacaaaattaataatatttgtaatcaaccaacacaagcaattagtgagtataaaacatctttaaatgagatagcagataaggtaaatccacaagaagaatacagtaaggcatgcaaggaattacaggaaattatagataatgaagattatcttgcggctcttcgcgtgataaataataaaggccttttgccttttacgaatttgtcaaatgcgtttggctggaaaaagcaatattatattgattatgtaattaggttgcttgagattaaagataatacttcagaggagttatgtgctatatttaaaaaatatgtttctgtgggagactaaaaaatgccttagtagtaagaaattccattttactatctattgttactactaacaggcagtaacaatttgcttaattttgctctgatttgccacaatctgtagtttcagagcaaactataaaaatcccagaattccttacgaaacaaggagaaccaaaataatgataaaaatattattcgtctgccgcagtccgatggcggagttcgtgatgaaggacttggtcaagaaagctgggctggcgtcacaattccatatcgagtcggcagcgaccagccgggaggagatcggcaatccggtctatcctccagcgcgtcgcaagttggcggaacatgggatctcctgcgacggtcacgcggcgcggcagctcaccaatgccgattacgagaagtacaatctgttgattggcatggaccgggcgaaccttcgggatatgtaccgcatctgcggcggcgatttttccggcaagctgcatctcttgatggactacaccaagcagccccgcgatgtagccgacccatggtacaccgacgatttcgaggcgacctggcaggatgtgctggcaggatgccaagggctgctgcatgaactgatggaggaaaacaaaaaatgctgatgaattccaacgactatctgaatatcgtcgaatcgaccaagcaggagatccgcacagcgcaataccgcgcgacggtcagcgtcaatcgagagctgctggttctctaccactccatcggcgaggtcatcaacgagcacaagacatggggcaacaaatttgttgaaaatcttgccgccgacattaaaatttcttttccggacgccaccggctactccgtgagaaacttgaaatatatggcgaaattcgcagcggcctatccggacgatgaatttgtgcaacagcctgttgcacaaattccgtgggggcacaatatcactctgctggacaagctctctgataacgaagaacgcctctggtacgcagaaaaaattgcagagaacggctggtctcgcaatgtgctggtccaccagattgagagcaggttatatcagcggcaggttctggcagagaaagtatccaactttgaaagtcgccttccgtctccacagagcgagcttgcagtccagacaatgaaagacccgtatatctttgattttatcccattcaaagaggatatgatagagcgtgacatcgaacaggcgctggtcaaggatgtgacaaagctcctgctggagctggggaccggctttgcgttcctcggcaaccagtaccacctcaatgtgggcggcgatgacttctacatcgacctgctgttctataacctgaacctctgttgctatgtggtggttgaactgaagaccggcgagttcaagccggaatacgccggacagcttaacttctacctctctgccgtggatggtatcctgaaaaaagagcaggacaatccctcgattggtctgctgctctgcaagagcaagaatgacctcgtggcagagtattcgctcaaggacatgagcaagcccatcggcgtcagcgcctatcagatcaccagcaacctgccgaaagaactggaacgccaactgccgtccgtggaggatatccagaaacgaatcaagaacgcaaaagagtaacggcattatatagattaagatatatggtagtggacaacgaagcattgctgggtaccatatggaaaatggaggaacaacaggtgaatcaggaacaattggttacgctgcaatatatagacaacgcggttaggaagacaatagcggagattgatatttctaaattcgagtccagaactgttgctgcagaatatatgctaagaatgctacaggaggaaggctttaacgaggctacagacagtagaaaactgcatgtagtagagcttaatattccttttgaaaattgcgaatgtattccaaatcacgcgacagtgatgtattctgcggtcatagctccgaattgtgcagtaggatttgataaagatggaatctattatgctgcttactcttctgaaaaatcacatcttgagtatccgcatatacatgcaaagtattcaggagaagagattagcatttaccttaatgattttcacattgatggaaagatgaggagtaagaagaaagagaaagaagcgattgaatatgttagacgcaatgtcgagagctttttggaaatgtgggaagcagcacatgggaaatgagaggagcaccctatagaacgaaaatatccagattgtcgccctcttccaataaaaaaacctcgcagtctcaacggctgcggggtttttcttgtatttgcaagggttttctggcttacctgtttgcgcattacttgcgatatttgcaagtaatctttcgttaaaacagtgtttttgcagatggattgcagatgaaattacagatgaaattcggattcaaaaaagccgtcgacggcatctgccactgctacggctttatcatccatggtgtgctgatatacgttttttagcatgttgtttgtggagtgccccatgcgctccattgcgtatttatcggggacattgagcctgagcatgaccgatgcgtttacatggcggaggtcgtggaagcggaacggctgaactccgcagcgggcgcacgcgcgttgcagatgcttatacaggacgttcctggtcgcatgggcaatatactcatctgtgtgcggtgtttcgtcaagcagccccataatatacggcggcactttcagttttctgtttccgctgtacgttttaggctgcttgagctgcggaccgtcctcactgtctaccattgcctgcttgattgtcaggatatcaccgtcaagacaatcccatgtcagacctctgatctccgaggtacggaggccgagccagacagccagaaggaaaggcaattcaaagtctgtgcccttgcagagtgttaccgcgtcattgaccagaacatccgtctgctccctgccaagcttctttctcagctcacctaagagataagcgaagccgccaagcttttcataatatcttttatcgatcataaatttatgctcctcagcatcgcagattccggctggtttgcttcatcataacgcattattaagaaatgtgtaaagctatctatgcggagagagctgtttaggtcatcttcagtaataaattatcttgagccctgcgcaggaaaatagtataataaaatcgataatagctacggaggaaaaagcagatgcatatttcgaatgatattcgctatattggcgtaaacgatcatcagatcgatctgtttgaaggacagtatattgttccaaacggaatggcatacaactcgtatgtaatcatggatgagaaaattgcggtcctggacaccgttgaccagcattttggcgcggattggttcgcaaatcttgagaaagaattagatggccgccagccggactatctcgtggtgcatcacatggagccggatcattccgcgaatatcggaaacttcatagcaaagtatccaaacacgaagatcgtcgcgtctctgcccgccttcaacatgatgaagaattactacgagaccgattttcccgcgcagaagatggtggtcaaggaaggcagcacgctggagttgggaaagcataccctgacttttatcggggcggccatggttcattggccggaggtgctgatgagctatgagagcacggagaaggtgctttttaccgcggacgcctttggaaagttcggcgcgctggacgtggaggaggactgggcctgtgaagctcgccgctactacatcgggatcgtgggcaagttcggcgcacaggtgcagacggtcctcaagaaggcggcggccctggatattcagacgatctgtccccttcacggaccggtccttacggaaaatctgggatactatatcaacctgtacaatatctggtccagctacgctgtggagagcgaaggtgtaatgatcgcatattcctctgtgtacggcaacacgaagaaggcggtggagtatctcgcggaggagctgaaggccaagggctgtccgaaggtcgttgtgtgcgacctggctcgtgaggatatggcagaggccgtggaggacgcgttccgctatggcaagctcgtgttggcgaccacgacctataacggcgacatcttcccgttcatgcgcacgttcatcgatcacctcacggagcgaaacttccagaacagaaagatcgcattggtagagaacggctcctgggcgcccgttgcagccaaggtgatggcaaaagcgctggaaggcagcaagaatattgaattggcaggcaccgtcacgatcaggggcacactcaaggaagagaataagcgccagctggcagagctggccgccggattgatgcagtgatcacggggcttccgctctgatgaaaaatattgagattgccacatctttccactgtgcccgaatttcacctattttccattgaatatttttgggagtcgatacggacacttgaaattgaaagcggcggcagaatggccctgccattctgccgccgctgctcgtacgaaatgagaatcttatgtatatgcatgacacgaaaaggatttaaaatcaaaggcggaggcctgctatccagcaggcctccgccttttcccaaatggttgtgtttatttcccgctgtggcgagcgatgatctcgtcggcctcgctctgcgtcatgttgccgagccggacctgcttttcacagaacggcttgacggcggcgagaagcgcttcgtccgtctcatacgggccgaacgtgtattctttgccgttgtctaacttgatgtacagccccttttcatccgtcgacgtgctgatgtcggcgggggtgtagctcattatcagctgatcgtctccgtcgacggatttggagtacatgatgccgtttttgatgtccgatagagtctcctcgtacatggcgatggtcttgtcaatctcctcctgcgtccaggtgaatttctgaccgccgatcgtgtcggtctcgccaagaagactccggagctgcaccttttcgttgtcgagccacgccttgtactcgtcatacgtccaccactcgacgttcggcgtggggaagcgggcatcaaactcctcgtccgtcatcggcgcgaaggtcttgccgtcgtcgaagctgtaatacgttttgccgtccgtcgggtcgacgtaagacatcagcgagctttcgcccacctcggtctcgacgtcgttcgggtgacggtcgacgagctcagtaaactgctttttagtgatcggagcgagctcggtgaccttgccgtcgctgccgcgcttgatggcgaggtagatgtcgcctgccgcggtgtcgttggtataggtgccgcctttgtcgtcgtacatgccggcaacggccttgccctgatagaaccaggtggagtcctgatacgtgagccctgtggcgaggagctccgcgtccggctggatatttgtgccataggcggcggttgctctgtcgccgttgtctgcctccgcttgggcggaggtcgcaaaggcggctgccgttccggtgatcaggacagccgccagaacgaacgagatgatggttgttttcttcgttttcataattgctgtgatcctttcttcaatggcatttttactgaagccgttgcaaaggggcgcgacgccgctgcgcgtttccatcatgcggatgagggtgcgcgcatagtccgcccgcgcgccgccgaaacggtgcacgactgtttcgtcgcacgagagctcgaggtcacggttcgcgagcacgtacatgacccacacgagcggatcgaaccagtggacgcagacggcggcgatgagcgtgagcttggagagcgcgtcgaagcgctggacgtggacaaactcgtgctccagaacgaagcgcagagtgccctcgtccgaccagtcagtcgacttcggcatcagaatgacggggcgcaggacgccgaacgtcagcggggacgagacgcggtccgactggcggatgacgagcttgcggcgcagaggatgtgctgcaagccagcggcgggcatagtcatgttcgaccggcagcgaggtttggaattcgcgatagcacctgacgtagagcaccgcaaatgtcagcgcacagacctcaatgcccacaagccagacgactgcccacggcgagaccgtcgacgcgggaggcgcagtgacctgcggcatgacggtgacgggtgccgccggcaggaccggcggaggagagacggcggtggcatccgataccgcaggtgcctgacgcgcaagcagcgtgtagacgctcaggcgcgaggggagcgagaacggcacaagcagccgcatgagcgcgagcgcccagagcaccagaaacgtctttttcggcacttggttgagcgtcagcgcgcggagaatggtgatgaccgcgatcatcaccgcgccgtgcaggctcatctgcaaaaggctcatcccttcaccctcattccagttcgccgacgatcttcttgagctgcgcgatctgctcggcggagagctttttgcgccccagcagcgcggcgaagagcttgtcggccgagccgtcgtagatcttgttgatgagttcgtcggtctccgcctcctgcacggcggacttggggatcagcgcatggcagaggaagcccggctcgctgcgctcgatcgcgccctttttcatgcagcgcttgatgagcgtgtaggtcgtgttcacgttccagccgagatcgtctgtgagcgtgcgcgcgatctccttggcgggcgtatcgccgcgcttccacaaaacgtccatcacctttaattccgagtcgaacagtttgatatccatgagaaggcctccttcataagactttagtagtagctacaagcacataatactccagtcttatcacaatgtcaatactacggtgtcttaaaaaaggcttaagacaggataccttcctttttgcgcaattttgcaaatcgtttgctttaccgtgcgggaataaaaacgcaggccgctcaatggagacgctctcgcacatcctgacataaaagaaagggtcccgaaagttcaactttcgggaccctttttgtcagctgctgagttcgcggatttcgtcctgaatgagccggcccgccgcggcggcgagctggtcgatgcggcggatgcgcgcaagatcgcggccatagatggcgtttgcggcgggaacactcgcgttttcacccatgaagacggccgcgacgcggacgccctgtgcgcgcagggcgcgcacctcctccgctgtgtcgtcgacgccgatctgcccgtcgtagtcacggctgagcggaactttgccgctcggcagaattttgtggctgtcgtcgggcgaggcgtcggtcagcagaatgagcagatgcttttctgcgggtgcggacttgatgagctcgcccgcgccgcgcagcgcgaggccgtcgcggttccagcccgcggcgaagtaattgaagacattgcgctcgccgttcttgtcgccaaaatccttcaaaatgcgcagcaccgtgtagccgcgcaggctgcaaaagctcgtcacgcgcacggggatgccgcaggaggcaagactcttggccagaatgtagccttgaatggcgatggcctcttgacagtgcaggcgcgaggccgaggcgtcgagcatcagatcgacggcaaagccgggacggctctcctcgtcgctgcgcagaaacacacggtcgtcgtgcagcaccggttcgcgccagaccttcgtcccgtccagccagccctgacgggcggggatgcgctcgggctgctggtggacgagcaggcagtttcgaatttgctcgctcaggcgcgcgagcgcgctctggtgcagatcgaggtcgcgcgcgaaggcggcgcggttcagcctggcctgttcctcggcctgctcgtaaagacgctgcgtgtccgcgctgatgagctggtccgacgcgctcgcgccccttgtgaaccacaagtggcagcctaagtggttgccggtgcagagctgctgctcgatgcgcgcgagcttgtcgggcgaatagatgctgcggccgaagcagcgctcgatgtagccgcggtcctccgtttcgtgctcgttggagcgcagacgcgcgcgcagcgcgtttgagaccttgaccatgccgttttcgcccggcatggcggagcggccgatggtcagatcgtccgtgcggacgatctccgtcggcaggagcttggtgagaagtggcgcccacttgtcgtcaaagtgcagctggaagccgccttttttatgcactgtaccgtcgaattgcaggtatttttcaaacgccgcgcgcacggcgatctcaagctccgcggcgttcatcgtgccggggcaggcgagtgcttgcgcaagccccttttcccacggggcgagaatgggcggcttttgcccgaggatcgtcttccagcggtcggactgcacggcgtagacgagctgatttttctccatccactcctgccgcgagagctggtattccgacgcgaaaaattcctccgcgtgcgtgcggcggaggtcggtaagcacagggcgctcgggcagctccttttcatacgccgcgttctcgagcgccagccagcagagctcgtcgaaaacgttctgccgcgcgtcgcccgcccagtaggcaaagagacgctttggcatcttgtcgccgaaccacttgtgcacaaggccgatgacgcagttcatgtaaaagtccggctcaccgtttgatttgagcgctaagaactgcggctcgaactgatagtccccgctcgccgtccagacgaggttgatggcgcggcgctgctgggcggaatagcttgacgtttccatgtcagtcggtgaacaggcggctgcggtcgagctttgcggggatgcgcgcggcgatgacgtcgcggatcaggctttgctcgtaggcgtcaaacgccttgttcgtgatgcccatgtcaagcgcgcggctcgcgcccacgccgcagcggatcagacgcagcgcgtcgagaagaccgcgcaggtcgagtgccttttcggagatctccgcgttttcgcactttttctgcaggtcgaggaacagctgggcgaactgctccttatacttcttttcaagcgttgggaactcatcgctaagcaaccgcacaagaccgtcctggtcgatggacggcatctgaataacgacaaaacgtgaggtcagcgcctcgttcagctcgcgtgtgccggcatagccgtagttcatcgtgccgatgaagcgcgcggcgggatcgacctctacgcgctcgtatcccggcacatcgatggcgcggcggaagtcgagcgtcgcgtgcagtacagcaagcgcctcattttttgccatgttgatctcgtcgagcacgccgaagccaccatgctttgcgcaaaggtacacggggccggggcggaagcggacctcgccgccctcgaacgtgtccatgccgatgaggctcgcggcgtccatgttcacgtggaacgacacgtcccatgcgggacgggcgaagacctgggcgaggttttccgccagcacgtttttgcccgtggccttgctgcccgcgagcagcaggttctccccgcacaaaatggcggcgaccgccgcctcccacacgtccttgccataataatgataccgcggctgcgggatgcggttttgcagctccggcggcgtcggatactgcgcgttaaattcacgaatgccatccaaaaggtcgggactcagcccctcctgtttcaaaaaatccaacaaatcgatcactctttcttgccatgtgcattgcatgttctttttttcggtcatcatcataacacggaaaaggcggtttgcaagtggtttttgaaattttttgcaaaacctctacggggttgtgtccctgcgccgcgcaggggagcggttaagggggatattctctcacgtgagagaatatcccccttacacccccaagagaacgcaaggggctctgccccttgaccccgccattgcaagcgagcagctcgaagaggtgcgatgcttgccgattgcactgcccatagcgcggcgttgccgcgtttagagctgcaagacgacttgcctctgcttctactatccgctgccgctctgcctgtctcgtagtagtgcagactaatttccgtctaccggagcactcatcaatgcggcgagcgcagcaatgccgtattccgcacgcagtctgccgccgagggaacgtcactcgcgcctcacgatagtaaggcgcggttgcaatcggtaacgattcgcagaagattcatggcgaagccatgtacactgcacccgattgcgcagcgtgtgcagttcttcaagatcgagactgccaatgtcgggggttgagggggactcccctcgcgttctcttgggggatctaaagggggccattctctcacgtgagagaatggccccctttgtccgcaccctgcgggtacgcagggaataggaaaacggcgcttgcgccgcattgcaaaatgcgtattgacaaaatatgacgttatccatataatgtcataagttgaaaaaagggaggccacctgctatgctgctgaaaaaacgcaacaaatgtcatttcgcttccctatttgtttttcatatttagaatatggaccatctgtcgattcctcgacaggtggtctttttttaggaggagagagcgatgatcgaaaattggaaggacgttcagatcgtgccggagttctgcgatcagggcgtggactgctaccgtttggagggagggtacttcctcaacgagtattacattgtctcggaggccgagacgcgaaagctgatgaaccatccggaggtggtgggctacgaggtgtacgcctcgctcgtgacggcgacctcgcagatgatgtactacctgaaggagaaaaagaagatcacgtcggcgaatatcctctcgatcctgcggggagccttgaactacccgctggaggagagctgctacaaagaacacatccgcgtccacgacatcagctttatgtcgagcgagcgcgtttttgaaaacggcgagatgacgggccttgagatcaaatactgcaagcttgccaccgtgccgaacagcacgctgctgattggcgacatcatcgcctccggcgagacgcttgtgaactgcctgcgctatgtaatcgactattaccgcaagcagggggaccaagctgcgcaatacgatcgtcagctatatcgccgtcccgatggtggcggtactgggtacggtcgcgatgatcctcgccgtcgtgcgcggcgacggcacgatcgtggatcagttcgccaagtccagcggcacgctgacggtgatcggcggcgcgggactggtcgttggctcgttcgtctccggcggcacggcgacgccgaacttctcccgctttgccaaaagcggcaaggtgggcgccatcacaacggtgatcgcgttcttcatcggcaactctctgatgttcttcttcggcggtgtctcgtcggtctatgtgggcggcaacgacatcttcgaggtgatgatcaaccttggcctgttctacctcgccattctggtcctgggcctgaacatctggacgacgaacgacaacgcgctctattccgcgggcctcggccttgccaacatcttcggccagaaaaagaagcccatggtgctcgtctcgggcatcatcggtacagtgctcgccgtctggctgtactggaacttctgcggctggctgaacatcctgaactgcaccctgccgccggtgggtatcattctggtgctcggctacttcctgaacaaggagaaatatcaggacgtggaggtcagcgagacggtcaactggttcgcggtgatcggcgtggtgctcggcgcggtggtagcaaatctggtgcactggggcatcgcctcgatcaatggcatggtggtcgccgcggtgtgctacctgattggccgcgcggtggagaagaagtaaaaaagcgtaatttccacccaaaataacagaacaaaagcccatcagctcgtcgagttgatgggctttttcctttgcatgaagtgcagaagatcacttcgtgctcgccgcgtagagcatgatcgccgtcagcgcgatatagaccgcgcaggccgcggcgatcacagcgcagagtgcgatgcaggcgacgcgaagcggcttattatgcctcagctttcgcgctgagagcacggcgcccgcaacggacagaaggaacagcagtatcgcgacccaaagctgcatacgaccgctcctttcttcactccgccgcggggcggaagacgtcgatcatgtcggtgcaccacttgagctcgcgggtgaagcggcggcgcagcgcgtcgagcggctccttgcccttaccgacgtcgaaaaagccgcggccgctgtgcacggcgaggtacaatgtcccatcagaatgcaggctgacggaaaaatcgccgaaggcgctgttggtgagcgcaaggatgcgctccatgcggctgggattcaaaaagcgcagtgcccagtcggcatcatcgcagctcaggttgaagtgcttgttgaaatcttcatagtccgtcttgatcgttttggcgcggaaaagcttgtcgagcttgccgcgcggccagaacgtgagttcggcggggtacgttttgccgagctcacaggccatccactgaccattgtagaccacgcgctcggcggactccagcatgtcgttgttttcgttgcggtattcgtccacatccgtcagcgtgacggtgcagagctcggacgtaaggccgcggtaggtgaagtcgatgcggccgctggcgttgtcgtagacgtatgacggcagcggaatgtttgaccccttgatatccacaaggtttcgttttccgatgagctgcacgtcttcaaagttcgcgttcatgatctccggcacgagggattcaaagaccgcttttccggtggccttttggtgcttgttcagaacgccctgccccagcagcgcgacgacgatgccgatgaccgtcagcgccgtgaccgaggtgaaaataccgatcgccgtcgcggcgcagccaatcaccgtgaggagcttgccgcggccaccgccgcgcttgccgttttgcagctcgcgcgcgagctgttcgtctgtcattgtttgattcttctccatggtgtcatcctttctcagtcccgcgccgcaaaaagggcggtgtttttcagcagaagatccagcgtttcctccattgcgtgcagcgacgcgcaatagctgcggcgcagggcatcaaggtcgcgcaggtctacattactggcaacggcggcaaagccatagtctgtttccaccgccagcgagagcacccggccttcccagcggaagcccaaaagctgtccttcgacgcgctgcctgaactcgttcatcagctccataaactgcggggcaagaagggagagggcatcctgctccggctctgctgtgacgcagaagcatcggtcaaacaactcatcgcccgtcgctgcgccgcgcggactgtcctccgtccttgcgttgacgaggacgggggaggaggcgggcgtctgcgtttcgcagcgcagcacgaggcctttgaagaccatctcgtggcaggtctcatagccttcgtgaccgcaccctcgctcatacacatggtccagccgcacgttggcggcggaaaaatgcacgccgcgataatcgccctcatggaaattctcaaccgtacattcctcccactgaccgtccagcaggtggaacgtccggagaaacggctcgtcaacgcacatttccggtgtgcgcatatccgggccgaaggccttttcccattccgcacggaaaaagtctccaaactgctcctgtatcagggccttgagcttcttttgcgcgctgccgcccaaaaagaccgcgcagcagacgccgccgaagaacagcacccccgtcaggatggccttgagcgcggtgtcctgcacggcaaagtacgagaccgtgccgctcaacgcgccaaaaaggcccaccaggatccagacgcgcgacattttctgatagtgtccgagctttttcgaaagctcggcatcgctgagcttttctcttcctgtcatttcacatccatcctttatcatggcgtttttcaaatatcccagttgtccatccagttttcgccccagtcgtcagcgggatcatacggcgcttcggggatccagcccgcgggatagacgagaccatcttcatagtggtaggcaaggccgtcgtcgccgatggtataatcgttgcccagaaggtaacggttcacaccgtcgtagtaccagatatagaaggcagagtactcgtcttcgtaaaactccgcgttttccatgtccgtgtaggcgtagaagtcggcgttgcggtaaaagacgccgtcaaagtgctgatcgtccccgtagcggccaaagcgttcggcggagagggtgaagctattgccgtcgtcgctggggcagaggtaggcgcgcgttccgttgtcgtagaggtagaggcccatgccctcgccctcgtcgttcatcgtgccgctcatggaatagtccggtgagcaggcgatgtactgcatgagggacgagtcgatgacgatggcctcgcccagggcgttctgccacatgccgtcccagttgcttttatcccactcgacgatctccgcctcgtcgtcgcggaggaaggtgtggcgatggatggtgagcccgctgccctcgccattctggttcggtagcagcacgccgtcgtcgcgcaggagaaaattgtagagaaagccgttgaaaaagatcatcggccggccgctcgcctcggacaattcaaattctccgcgcccgccgagaccccagccggtgcggtaggcgtaaaagccctcctcactgtcaaagtacagcttcgaggtgccgtcgatgctccacatcccgtcgagaaattccatgtccatgacggtctcatagccgctttgcggatcatcagagctgctgtcgccgcaggcggtcaggctcagcaggagcagcagcgcgagcacgagcggcagaagatacgttcggtgcgtcatgctgttcaccgcctttttagtagcaaatgctgaaaaacagcgtgttgtaggggtcgacaaggtcaatgtccatgatgctcgcctcgggcgcgatgctatcgagctgcatccgtctggcgcagtccttatagttgtcgagctgcggcatggcggcgaagaccagcccgtcgtaatcgtcgggcaggtagaccatgtagctcttggtcagcaccatcgcccaatcgctgacgttgtactgccagtcggtcgagtaggcgaattcgatgaggtattcgttgccgttataattgacggtatgaacatagtagttgtcgccgcgctggctgttgccgtaggcggtggcggcggtgaaccacatgccggtgtagtagtcgtagagctcgctgtcggtgttggtgatgtactgctcggtgaagtacgggatggagctctcgggaatgtagcagatggcgtcgaactgaatctcgcggatgccgtcgtgcgactggtcgctgtgcttcacgacctcccagtagcagtcatttctctcatagccgtcgccaaggccggagtagcaggcaacaccgttttccagaagataagtgcccgtgttgaccgcagcgttgatctgtaagccgttgtcagagaaatagggcgtgtcggtcaggtcggtctgcacgccgttttcgtggaagtaggagtaatccggctcgaagacatagcgctcgtcggcatcccagaaccagaccatctgcgtcgtgctcatgtcggcgtgctggaacgtcacgacgacgtcgctctcgccatcgccggtgatgtcgtcgaatgagatgtcaaagcctgtgccatcgtcgtttgcgtcctcgaccgtcacggggaaggacacgctgtcgaaaagctcctgctcgggctcgtcgcggtagaacgccgcgctctcaggccccacggtgacgagaaccttgacgctgccctcgccctcgtgcgtgatggtgccctcggcggcgaccacgccactcgcgcgccagtcgtcgcccgtgacgtcatcgctgctgtcgccgcaggcggtcaggctcaggcaaagcagaagcgtaagcagcgccgcgaggaaatgatggaatgatttcatcttcttttctcccttcttcactttttcaaaacggcttactcaagacgctcgtagtagtcgttctcgccgccccatacgatggaatcggtgtcaaaaagcgtgaattcataggtgacgtcctgatacgtcgtggaaacggcatagtacacgtcgtccacatcggtcggggccgagataaagccgccgtcgacctcggtcgtctccgcgccgggcgcgcgctcgtagagaccccagagaccgccgctgctgtcgatgtagatgtagctgtcggcgtcgagatcaccgtccagataccagatgcccgcaaggtaagagagatcgaccgaactgtcgctgctgttgtagtcttcggcctgcgcgtcgaactcgtcgaggctcatttcataggtgaacgagccgagcgaatagatgttcacgctgctgccgtcggcggagaactgataggcgacgccgtcgtgctcgttgtaggcgtagatgcagtcatagtccgcgtcgtactgcaaatagccgctggcggcgaggtcgtcgttgctgccgatgcgccagcgcgaaccgttggtgtcgatgatgagatagtcgaagtccgtgccgctgtcgggcagatagtaaccttcgaaagcgctgtaatcatagctgtcgtagctttccttgacaaagccgtcaatcgtcgacgggacattggagtcgtcgccgtagtctgtgtagtcgccggagtcgtcgctgccgcaggcggcgagggcaaggcaaaggatcagtgtcagggtgcaaagggcaaggtgcttacaagcgtttttcatggtgttctcctttcaattttgaaaaatcggcgctcagtgcgcccgttccgccatggacagaatttcgtcatggctcagctccacgttgtcgaagcggacaaagatgccgttcgtcatggcgctgttccacaccgcgggatcggcaagcgggcggaagcggagcttgtcgagatgcggcttcatatcgagcagcaggcggctgccggagacaaagtccacccgaagaatgtagcccgggagcggtgtgacggctgagatgtattttcggtacaaaggcattcctcccctccggaaaataaaagatccaccgtacagccattgtacggtggatcggaaaaagttggtattaaccaaaggttagataattttgcaggggcggtaatgcagaaacggatatgctgcgtccaagctgtgtcttagctcttcggcgcggcaagctcggcgagccgtttgcgcttggtgcgcacgtcgcctgtgatgagaagcttagaatagatctgattgatgtactgcttcacgcttccctcggacaaaaagagctgctcggcgatctcgcggttgctcaggcgcttggcgacgagcgcggcgatggcgctttcgcgctcggtgaggcccgcgagggcggcgggacgggagccttccgcacgcttttcgccgcagcggcgcacaaagtcctcgccaagcggtgtgaccgtccggacaaacgcggcaaatttcgcacccgcgccgcgcgtgagcgcggttttcaagtagcggtagttttcgacaaacggcagatagagcgcgtccggctccgccgcggcgagggcagagatcaaaagttcgtctgccgtctcgcgcttgccgagcatttcgtaggccgcggcggcctgaaggcggatgtgcagcgcgacgagcgcatagtgcatcgcctcgcatataccgagcagcgcttcgctgtggccaatgaccttggcatattcgccctgggcgaggtagacctgattttcgataagctccatcatcggctttccgggcgcgaggaagtggatggaggcgagttgatgctcgcggaagaccgcgggaattttttcgggcagtcccagcagcgcatagtaataggcgcaggagctttgcagaatgttgagccacgtgacgctatgcagccccagcagcgcctcgcgccgctgctcgaaggactctcgcggcgtgaaagaagtgcagagcgagagccgccaggcgagaaagtcgcagcacagggccatgttttcctgcccgttgccgtcaatctgcgcataggcgcgctcgagcatgatctgcgcgtcggcaaagcaggcgcgcatgaagtcggcctccgcgcgcatgatggtctcagcgccctgcccgtggccgtttgtgatcttatagtagtgcggcatgcactcgtccatctcggtgagctcgctctggagttcgccggacgcgcggtaaaacatcatcagcaccgacggcgagccgaacgtccagcccccgcttttctggatgctgatggcggggcgcgacatctgcgcgctcgcgctgcggtgcaggcggctcatcgcggagatgtcgttgtacatcaaaaagctcatgatgaggtcgcactcgccgagaaggtcgccgcgctcactctccggccagtcggggtgttcggtgatcgcggcgagcagcagctccttgagctcgagcatctttgggatctgccgccagttgaacatgctgcgcatcagaacgaggagcgaaagcgggtgctccttgagcgtttcgaccgggcagtgggcgatgaagtcgagcacctgctgcgcgccaagcgacgtgagcaggatgcccgcgtcgcgctggatgacgcgcagcgccgcgtcgtagtttttggcaagacagtagaatttgagcgcatgcagatattgcccatgcgttttgtaccactcaccatatctattatggtaaactgcctgccgccgcggctccatcgtgtggaacgtgcgctcggcgcagtccttcatcatgtggtggaagcggaacgtcacgccgtccggcaggcgattgacaaaggcgttctgctcggtcaacgtctgtaagatcgcagcggtgtttttgctgccggtgacggcttcggccatctcgacggtgaattcgtccgcaaggcccatgacggccaaaaattcgcgccgctttgacggcagcgggtcgatcatcgcggcggagaacatcgcgtagatatccgagctgcggctcggcagctcgccgcgctcgtgcagcgtgcggagatttaagtaaatggccgagaaccacccctcgcttgaatagagcagcgattcgatctgcgcgtccgagagctccgtgccgcagcggtgggcgtagatcgagagctccgtgtggttgaggcgcagctgctcggcacccacggtgtagagcctgccgccaaggcgcaggatctcctccgcgggcaggaagcggtcgcggcttgcgacgatcaggtgaacgttttcaggcaggcggttcgtcagcgtgcagagaaaggcgggcacgcggttgtcggtcaagaggtgaaagtcgtcgatgaaaatatagcagggccgcttgcccgcgagcgcgtggcagagatcgtccgtcaggaggcttccgcccgcggcgtcgtcggggcaggggtaggcgcgcagaaaatcgaaccccgcgtgggaaaaggcctcctgcacgctcttccagaagatggccagattgtccgaatacacgctgatacgcacaacggcggcttcgtcgagcttggcgcgctctaaaagataccagttcaccgccgtcgtcttgccgtagcccatcggcgcgaccacggtggtgagcgcgcagcgcgagatcgggcgcaggcactcctgcaggcgctcggatatgtagacggtgttcaaattccagcttcgcttcggcatggcgtacctccaagacagttttgaccgggggcttttctttcaagatatcatacgccgcgttttttgacaactatgagaaaaaagcggctgaatgaatgcggcatctgataaaaaagtaccctgaacggttcgttcagggtacttttattgaaataagctcttattttccgacgcagaagcgctcgaagatgcgcgcgaccatgtcctcgcgcgcggtgcggcccgtgagctcgccgagggcgttttccgcctgctctacttccgtgagtacaacgtcgggcgtcatgccgctttggagcgcgtccttcgccgcacggacgctatcaagcgcgcggcggatggcgtcggcctgacgggcgtttgtcacgagggacgtatcgcctttcggcgcggggtaaagcgtgcggatcgccgcttccagcgcttcgaacccctcgtgcgttacgcttgagagcgaaataatcgactccggcgtgcgccagtccttgtcggggacaatgcctgccccgccgccgaggtcggattttgtcagcagcagcagccacggcttgccgcttttcgcggcaagttccagcggagcaagcatttctgctgcccgcgcctcggatgccgacagtcccgtgctgccgtccaacagcgcgaggatcagatcagcgtcctcgaccgcttttttcgatcgctcgacgccgagctgttcgacgagatcgtccgtctcgtgtaggcccgccgtgtcgatgaggcgcagcagcacgccgccgaccgtcgccttttcctccaccgtgtcgcgcgtcgtgcccgcaatgtctgtgacgatggcacggtcaaagccgacgagcgcgttcaaaagtgagctcttgcctgcgttcggcgcgccgatgatggcggtcgcgacgccgtttttgagcactttcccgcgtgcgaacgtgccgagaagttcagaaagcgtctcttcacagcataaaagcgtgcgctcggtctcctcgcgcgagaggtcttcaatgtcctcgtcggggtagtcgacgacggcgtagaaacggctcgaaacgtcgagcagtttgtcataaacactttcgatcgggcggcgcagcgcgccggagagctgggccgcggcattgcgcgcgctctccgccgtctcggcgtcgatgaggtcgatgactgcctcagcctcggtgaggtcgagctttccgttcaggaacgcccgctgcgtgaattcaccgggccgcgcctgccgtgcgcccgcggcaaatgccgcttgcagcacctcactcagtacgaccggcgagccatggcagtggagctcggcgctctcctcgcccgtgtagctgtgggcggcggaaaaacagaccgccatgccgcggtcgagcagcgtgccgtccgccgagcggatgtcgccataggtcatgcggcggtacggaagcgcttcgaccgccatgccgcttgcgggtgtgaacagcgcggcgagcacgcgccgcgtctcctctccgctcaggcgcacgatgccgatggccgacgggctttgcgccgtggcgatggctgcaatggtttccatgaccgttttcctcgcttttcctcttgattttgcccaaagtataccacaaagacgaaaaaatgaaaaggggcgcggctgcgcccctcactgatttgagaattacatcaagtcaaaagaaaataaagctggctgagcagcacgacactctcgcatacgcagatgatcttaaaattgcgcgtgctcatgctgccctttttatactcatcaaggctgaaatatatcgtaagtgcggccgctatcatcgttatgacataaatgtacgtcgtttgtccctcctcaaaatcaagatctgatttcctcaaagccgagcttcgccaaaaccttggcgaccctgcgcgcaaaatcctgattggcgcccagactgatgttcataaggccctcgccgcctccggtgccgatgatcgtcgcctgctggacttctccggagtcgatgatctgcaccgtgctgacggccatactgccgtttctcatatagtaccgctccagaatgagcagcagcactttgacgccgttcacctccgacatctgctccagagacagctcggcaacatcgcccttgaaatcaccgagaatgcttttggatacctccgccaagtcggtctccgacccgcgcttcattttgatgatcgcagaactcatgctgtttcctcactttctcattttatctctcgtttggttttcgccgcccgcgtccgcgatgcgctcaacagcgccgcagcctgccggcgcaaaaaagaggccatcacaaacagaacgacagatcttttcactgcttggctttcgtttcctccaccgtccacggcaggaagatcgggaatatctcgatcacaaagtgcggctcctgaatatcgtcgtccgggtgggactgcgcgaggcggacctcgacgtcattggcatccttgaccgtcgcggcggcaaagcccgcttctgcgccgaagacgaggtactgcggcccgatgtacggcatccggccatcttcatccagttcgagcggcatcgtttcaaacggcttcgcgatgtcgacaccgagcgtttggagatacgccgtcacggcaggataggccttcgcggcctcttttacatagttgcggcaataggcgcagccgcacaggtcagactgcttaagctcgcgataaaattgcttcgttcgctcgatattcatcggtgccccgcctttcgatagtttgttttcttattataccatacggagattatgagctgcaagcgcaaaaaagcagcgccgaaaggcgctgcttttttgatgcgggggggatggacttacagtgggagggattcagttgaccgtcagcaatttgtgccggtccagcaggcggttcccatagcggaagaccagctcgccgatgacgatgccgagcaccgccgcggcgaggacatcgctcgggaagtggacgtacaagtacaaccgcgagaacgcgatgagcgccgcgagcggaatggccgcataaccaaagcatcggtttgtcttcgtcaagactgttgcactgatgacagaagagagcgcgtggcccgaggggaacgaatagtccgtgggattggcgatgagcagctgcacgctgctgtccagccagcaggggcgcgggcgggcaatgagatgtttgaggcagacattccccaccagcacgccgacgacgagccctgcaagcaggagaacgccctgcctgcggtattttttggtgcacagaaggatgaccgctgccaagatccagattgcgccgccgttgccgagcagcgtgatctttggcatcaggaagtccatcaagggacagatcggcgtactttggatccaatgcaggatgctccaatcgagattcacgacaggctctcccccttccgcgcgatctgcgcgggctggcccttgcgcgccgtcgcgcggcgcagaccttccagccccaacaggagcgcgatgccaagcaggaacgccggaatatcgaacgttgcaagacctaacggcggcagcggaacgtcgaggctcgcagggccgtttgcaatggcatagagcgagccgagcatcagtccgagaatgagccacaccatctggctgcggtatttgcgcagcgccatgcggatgccgtggatggacagtgcgatacccgcgagcacgccgaagcccagcgcgaacagccccggcagcacagaaagctcgagatgcagaaagctgcggacggcctgaatggcgggcagataccagaagctcgtctatcagcgcaagcacaagagcggtgagccgcccgctcccgtttccacggcggtctgaccgccgcagggatcgcctgcaagacaataaaaaggaacgctccgcgaggagcgttcttttttgcgtgctgggaatatcggggagcgatcggcgtgagaataccggaagatcagaaccgcaggtttgtatccttcacgaaattctgcacgccgtacagcaccagcgcgtcggtgatgtcgttctctttggcgtattccgtcacatcgcccttgaaaaagcgcaggtcgagaacatggacctccgcatagtcctccacggggaattgggaaaacgtgttgccgtaggaatccttgatgagcaggagcttgccgctctttccgctgccggaaatgaccgtctgcgcctgattggagttcagaaacaccgcatgctggtcgctgccggagaggtacttgcactcgtagatgctgttggtctcatattcgccgccgttgtaggagacattatggtattcgtgcttgtaccacgcggtgatctcctcggcggggacggtaggcagggggaccttattccaagtcgtaccatggaaattatcgcagagaatttcctgcgtccattcgtccgcattcggttcaatgccccgccatgcacaataggcatagtaggccccgaggctcgtccaatggtggtcggtgcggtaatagatgttctcgccgctgtgcgcggcgagggcggtcagcatgtccaccgtgtcaacgcccgcgtcggtcagtacctcaagaatggcggcataatccgccacgggcgcataggcgggcagcttgtctgtgagcacctgcgctgccacgggaacgaggatcgtgtccatggagatgtcctccgccgccagctttttttgcagctctgcgagcgcggctgcgttggcggcgagctgttttttgctgtaagacgtaaacttgtccatcaggtacttgtccctgccgatgtaaacgccgccgctttcccgtttgccgacggcaagctccagatagatcttcagcgtgacccaatcgtcgcgcagggggacttgatcggtgagatattgctcgagttcatcactgaacttaccggaaacgaagtcgacaatggtgaactgcggcttctgcatcagcgtgcgcttttcgcactctgaatgtcatcacagacaagctgcgattgaatcagattctcatcaacattgtgggcaatgccatcaaatttacgcccgtcggcggagatatcatcatccaccttgtggaaagaccctgctcgacaagcggatatgcggcttacgaattttccatcaaggataccggcatcgggatgtcctctgatttcctaggccacgtgttcgacacctttgcgcgtgagcagtctgccacggtgagcggcattcagggcaccggccttggcatggcgatcacgaagaatattgttgagatgatgggcggtacggtcgaggtggagagcgaagaaggaaagagctccaaatttaccgttacgctgacgctacgccttgccgacaagccgatcagatatgagccgatcgccgagctgcaaggcgcgcgggcgctcgtggtggatgatgacatcgagacctgccgcagcgtttgcaagatgctccgcagcatcgatatgcagcccgactggaccgtgaccgggaaagagaccgtcctccgtgcgcaggacgccgctgagctgaaggatgagtacaaggtctacatcgtggattatctgatacccgacatgaacggcatcgaaacgatccgcaggatccgtcgggtgatccatgaagatgtaccgatcattgtgctgacggcgtatgactgggcggattttgagaaggaagcaagagaggccggcgcgacggcctttgtagcaaaaccgatcttcatgtcggagctgcgaagcgtgctgacaaagcctgtccagatggaagagccgaagccggaggagacagaaaaaacattcgactacagcggcaagcgcgtcctccttgtggaggacaacgcgctgaaccgggagctcgctctggcaattctgggagagagcgggaagcagatcgactgtgccgaggacggcatcgaggcagtcaatcagatcaacgaggctccggaggaccggtatgatctggtgctgatggatatccagatgccgcgaatggatggctacacggcgacaagggagatccgcaccctgcccaacaaccgaaaggcaaatgtccccatcatcgccatgacggccaacgcctttgaagaggaccgaaaaaaagcctttgaatgcggcatgaacggatatatcgtcaaacccattgacagaaagagcatctcaaaggtgctcgaccagatcttcaaggaggcaaaatgatccggagctgtaaaggaccgttcacttgccgaatagcgtttgtgctgccgaaagaatagtgcaataagagaatattcagaccgctgtcgcttttcaaaagagagcagtgatctggatatttaataggaagagtttaaggcgttgggaagctgtcttcctttttctgctttgcggctcggagcgaagcgggaatttcgctatcgccatatgcgccgatgtatgatagaatatagacatcaaatgacgacgcgggtcgaagaaaggagctatcatgccaagtttatttctcagccacagcagtgcggacaagacttttgttgaaaagctggccaaagatcttgagggcgtcggcgtcaacgtttggtttgacaaatgggagatcaaagtgggagattcccttacggggaagatcgaggagggccttcaagccaacgattaccttgggctggtattgtcgcctgcggcggtggcttccgaatgggtaaaggcggagctgagcgctgcctggtgccgacagatgagctcccgtaagatcgtcgtcctgcctattttgtatcaggattgcgagatcccattccttctcgaggatagaaagtatgcggattttcgcacgagctatgatgagggctttatggcgctttgtgcggctcttgggctaaagcattcagaggctttgagtgaaaacaactggcgccttttcatgggcgacagagaagcggactggaaatattaccgcgagcaggagtataagaggctggtcacgaggttggtcgaccgtgcacggcaatacaactggtccagttggacaggtgggaccaaaaatccgctttccatcacgttcagcgcgtttattgaccgcaataaggaaaagtgcattgcgctccgcatggtgaagggcgcttatatggcggcggagaccgatgagtggaatccaaacaatacaaagctgtcactgtatacagagtatattgggaacacggtcaacgagtgcgaggaatatgtgtggcgcgagatggaaaaattccgagcgacatacggtgacccaacgggaaagtcggaacactttacgagccgttttctaaatgatgggcagaaattgaagatcatctccgagatgctccagaaaatggaccggtatcagggtgatatggaggacgagaaggatgaggaatgaggctgttttgctgcggctgctattttgaacaaagagagagccggttttgaccggctctctctttgtttacataatataaatcagcctttgatcgcaaagcgctactttgcggcgcgagtgaagatggcaacggcggtggtgatcagccccatcacggcaaagatgccgagcattccctgccccgtgatgagcagcgcgatctcaagatttgtcatagtgcgttcctccttaccctaaaagctgcggcacgagattgaggatcatgccgcctgcgagcaccgatgcgatctgaccggcgacgttcgcgccgacggcgtgcatcagcaggtggttggtgcagtccgcctcctgccccatcttctggatgacgcgcgcggacatcgggaaggccgagataccggccgcaccgaccatcggattcaccttgttcttgcagaagaggttcaaaagctttgcaaacatcatgcccgcgatggagtcaaagacaaaggcgacaagccccagcgccatgatgatgagcgtgttgagattgacgaactggtcggcctgcatcgaaaacgagatcgtgatgccgagcaggagcgtgatgaggttggcaaggtcgttctgcgccgtctgagagaggcgttcgaggcagccgcactcgcgcagcaggttgccgaacatcagaaaacccacgagcgagacggacatcggcgcgatgaagcccgcgatgatcgtgaccatgatggggaagcagatgcgcagtgaacgggagacgtgcttggggttgtagggcatgtgcatcgcacgctctttcttggtggtcacgagcttgatggcgaacggctggatgatcggcacgagcgccatgtacgagtacgccgcgaccgcgatgggcccgatataattggaatggagcacctgcgaaacgaggatcgacgtcgggccgtccgccgcgccgatgatgccgatggaggccgcgtccttcaagtcaaagcccagcatgaccgccgcgatcatcgcaaagaagatgccgaactgcgccgccgcaccgaagaggaacatcttcgggttcgagagcagcgggccgaagtcgatcatcgcgccgatgccgatgaacagcagcagcggcagcgcctcgctcgcctcgatcgtcgtttcaaagagccactggatgatgccctgactctcgccgacgcctgcgaccatctgattgaggacaccggacatcggcagattaacaaggatcgcgccgaagcccatcggcagcagaagagacggctcatagtcctttttgatggcgagatagatgagcagtgcgcccaccacatacatcacgcactgctgcggtgtgaccgcgcggatgccgtcgagcagatagctcatggtctcacctcgcttacgtccaccagccgatgttggcggcaattagaacggcgttgaagaagtcgatgaacatgccgccgaccatcgggatggcaaagtacgccaccggcgaaggaccgtatttcttcgtcacgacctgcatgttggccatggcgttcgaggtcgcgcccatggagaagccgatgaagccagcggtcatgaccgccgcgtcgtaattgcggcccatgacgttgaagaccacgaagtaggagaagaggaacatcacgacgcactggagcacaaggcagatgaccatcggcatcgcaaggtcgacgagctcccagagcttgaggcccgcgagcgccatagcgaggaagatcgagaggaacatattgcccatggtgtcgatctcttcggcagggtaggagacatgtacgccgtccatcacgttgcggacgaccacggcgacgagcatcgcgccgatgtaagcggggaaggtgaggccggtgagcgccgtgagccatacgctgacctgattgccgatgccgacggcgagaagcagcagcatgaagcctttgacaaagcgcgggctgtcggagatgaagcgctcgtcctcgctggccacgtcggtcgcaagggcggcagagggggctgcgccgacgacagtcgccagagcgggacgcagatcatgcttttcgatgagacgctttgccgttgggccgcccatgagtgatccggccacaaggccgaaagtcgctgccgcgatggagacgacgctgccgccgaccgcgccagcggcctcaaggtccgggccgaatgccgccgccgtgccggggccgccgaccagggcgatggaaccgcagccgatgccgagcagagggtcgcgcccgaaaagcgccatcacgcctccgccgaggaagttttgcagcgggatcatcacgatggagatggcaaggcacaggatgacagctttgccgcccttgagcagcgcggggatactgaccgtgaagccgacggtggtgaagaacatgatcataaagacggtttgcagcgtcgcgtcgaaggtgatggacgcgatgcccgtggaatagagaatgcagttgaggatagaaaagcagagtccgccgaccagcggagcggggatgcagtagcggctgagcagcgagaccttgtcggtgatgacgccgcccagccagaacaggaaagcgcccagagcaacagcgtggtacatgttgagttcgatcgtcagcataatgattcctccttttatgtgtccggttcggcgcgcggcagccacataccactctgccgcgtaccctttcaatcagcagtctaatccggaatcgcgaaaaggagttgttaaattcagtcaaatgagataatttccacatttcaaccgataaaaatgttatgaaaacggataatttgaccgtttaaaatacataaatatcaataaaaagtttagaaaacgctcaaaatgtgtgaaaggggaaaataaaaccaaacgggaaattgatgcactgtaccggcatgaaacgcatctgcgtttatacgaatgaggttcacggcaacaaaaaaggaaataaggagcacggctgcacagccgttggaagcggctcgggcggaattgaccgccgttttcgagattcgatagaatttgcatgtgccgttttcgaatctttatacagtccgctatgaaatcgcgcttgcagaaccgcggggaacgctgtagaataatagacaatatcggtcaattattgacaaggagtattcattatgcagcaaaatgcaaaattcatccgtaaactgcccatcccgatggacattaaaaaagagttccccgtcacggaagaggtcgccaaggtgcgtgaggcgcgtgtggaagagatgcgcgcgatcctcgacgggcgtgacagccgcctgatgctcatcatcggcccctgctctgccgaccgcgaggacagcgtgatggactatgtctgccgcctcgtccccctgcaggaaaaggtcaaggataagatcctgatcgtcccgcgcatctacacgaacaagccgcgcaccaacggctcgggctacaagggcatgctccaccagcccgacccgagcaaaaagcccgacatgctcgagggcatcatcgccatccgccgtctccacacccgcgcggtgcaggagaccggctttgcctgtgccgacgagatgctctatcccgaaaactaccgctatctctccgacattctgggctatgtcgctgtcggcgcgcgctcagtcgagaatcagcagcaccgcctcgtcgcgagcggtattgatgtgcccgtcggcatgaagaaccccacgggcggcgatttgagcgtgatgatgaactccatctacgcggcgatgggtgaccacacgttcctctaccgcggctgggaggtcgagaccgcaggcaacccctatgcccacgccatcatgcgcggctatgtgaacgaaaagggcgacagccgccccaactaccactatgaagacctgatgcagctgcacaagctgtacgaggaaaagggcatcaagaaccccgcctgcatcgtcgactgcaaccacgccaactccggcaagcagtacttagagcagatccgcatcgcgaaggaagtcctgcactccaagcgccactcgaatgacatcaacgcgctcgtcaagggcctgatgatcgagagctacatcgaggacggcaaccagaagatcagcgagggcacctacggcaagagcatcaccgacgcctgcctcggctgggaaaagagcgaaaagctcgtgctggagctggctgatttgctgtaaatcagtatacgataaaatgaaaaactcccacggttccggtattaccggaaccgtgggagtttttatgtcaactgcaggacgaaacttatttcgcctgcttcatggagaggctgatgcgctttttcttttcatccacttccagcacgacgaccttgacgacgtcgccgacggacacgacctcggacgggtgcttgatgaacttgttcgacacctgcgagatgtggacaagtccatcctgatgcacgccgatgtccacgaacacgccgaagtcgatgacgttgcgcaccgtgccggtcaacaccatgccgggctttaggtctttcatttcaagaacgtcggtgcgcaggatgggctttggcagctcgtcgcgcacgtcgcggccgggctttaagagttccgagacgatatcgcgcagcgtgggaacgccgacgccaatctcacccgcggccttgtcctcgccgtaggccttgacgcgatcgggcagatcggcgagcctgccgtccttcacgtcggcgagcgtgtggccagtcaggtcgagcagcgccttcgcggcgtcatagctctcggggtggacggcggtgttgtcgagaacgctcctgctctccggcacgcgcaggaagcctgcgcactgctggaaggccttggggccgagctttggcactttcttgatctgcgcgcgtgaggtgaacgcgccgttctcctcgcggtacgagacgacatttttcgccgttgtgccgtttaggcccgcgacgcgctgcaaaagtgacggcgacgccgtgttgatatccacgccgacggcgttgacgcagtcctcgaccacgccgttcagcgcctcgtcgagctgcttttgcggcatgtcgtgctgatactgccccacgccaatggccttggggtcgatcttcacgagctcggcaagcgggtcctgtaatctccgcgcgatggacacggcggagcggaggttcacgtcgtactgcgggaattcctcggcggcgagcttgctcgccgagtacacggacgcgcccgcctcagagacgatcatgtagctcacgtgcgcaccgccctcgttcacctgacggatgagctcgacggccatctgttcggtctcgcggctggccgtgccgttgccgatggcgatgtgctccacaccgtgctttttgatgagcgttgccagcacggcgatggcttcatttttctgccgctcgccgtaggtcgggtagaccacggcggtatcgagcaccttgcctgtgccgtccacgacggcgaccttgcagcccatgcggtaaccgggatcaaggcccatcgtgaccttgcccttgaccggcggttgcatcaaaagcggctttaagttgagcgcaaactggccgatggcaccctcgtctgcctgctcagtgagctgatttcgcacctcgcgctcgagcgaggggaagatgagacggtcgtaggcgtcctcggcggcggacttgacgaattccatggcggcggagccgggcttcacgactgcacggcgcagcagcgggagcgcctgctcgcggtcgagcgtgatggagaccttcaaaatgccttctttttcaccgcggttgatggcgagcacctgatgcccctgcaagcgggcgacagactgcgtaaaatcgtagtataggcgatagacgctgtcgtcctcggtcgcggccctgctcacaagctggccctgacgggaaatgagagcgcgaaggctcttgcggatggcggcgtcgtcagagatctgctcagcgatgatgtcgctcgcgccctgcagggcgtcctcgaccgtctcgacgcccttttcggggtcgacaaagttgcgcgcggcctcctcgggccgcgggcagtcacgctcctgcgcaaagagcagcgcggcgagtggttcaaggcccttttccttcgccatcgtggcgcgggtgcggcgcttttgcttgtaggggcggtagaggtcttcgacctcggcgagcgttttggcgctgtcgatggcggcagcgagctcatcggtcagcttgccctgctcgtcgatggactttttcaccgcttcgcggcgctcttcaagaccgcgcaggtattggagccgctcttcgagcgtgcgcagagacgtgtcgtccattgcaccgtggagctccttgcggtagcgggcgataaaggggatggtgttgccctcgtcgagcaagcgcacgacgttttcaacgtgtcgggggtctttgccgagctcggcggcaagggcctgaatgagatccataaaatgttcctttcgtatatcgggcgccgaagcggcgcggtcaagtgaatcagcaatgtccgcccgaaagcgggcggaacgtaaaactcattataccgcatcgtgcggcgatgcgcaaagccttttgcacggaaaaaggcggagaatcggcgcgacggctggggctttacattttgccgctttggcggtaaaatacgacgcaacgttcaaaggcatcgaatgcttcgctttgccgctcaaaggcggcatttttcagcaagagaaggagaaagcaaaatgcagaagaaaaacaacaaaggcgtcatcgccctcatcatcgtgcttgtgctggcggctgccgcgctcgtcatttgtcagataaacaagccggagacgcagcagggcggtaaggagatcaccgtcaacgtcgaccacctgaacggcgatgacacgaccttcaccatccacaccgacgaagagtacctgcgcggcgcgctcgagcaggaagacctcatcgagggcacagagatcgagtacggcctctatgtgttgactgtggacggcgagaccgccgacgagaacgagcagcagtggtggggctacagcgtgaacggcacgtttgccgagctcggcgtggacagccagcccgtcgcggacggcgatgtgtacgactttgtgctgaatgtcggctggtaagtccgcaagactcagcatccgcgagatcgcggagctgtcgcttttctgcgcgctgatggtcgcgggcaaggagtgcctgcgcctcattccgaacgtgcatccggtcacgctgctgctgcttttggccacggcggtgtacggcgcgaaggcgctttatccggcgttcggctttgccctgctcgagatcgcgctctacggcgcggggctttggaacctgatgtatctctacgtctggccgatcgtcgtgcttgccgcgctgccgtttcgcagaagcgagagccgcgcgctctgggcggccatcgcggggctgcacgggctgtgcttcggcgtgctgtgcgccattccgtattttttcatcggcggatggcagatggcgttttcgtggtgggtctcgggcatcccgtatgacgtcatccactgcgtgtcaaatacggtcctcgtcttcgtgctcttcccgccgctgcggcgcgcactggagcgcgcgaagaaaacgtcgggcggaagagaatagcaaaaagcacctgccttcaaggcaggtgctttttgtctggtcgtgtcgcttttcagcgtataagtgtcagaacagcgtttcctcgtcctcggagaacagccggtcgttgacggcgaaaaggtccatgccgtgcagcagcccgtaaatgatgatcgcgtcgcgccggaccttgggatagagctcggcgaggccgcacaggcgcagaagctcctgcgtctcctcgagcgaggcactcaatccaaagcacaggcacagcatgcggctgcgcgagggattgcgccgtcccgcaaaaatctggtgcaggtatatttcgctcatgccggactgcttggcgagcgcggccttggaaagacccttcttttcaagcatttcgttgagtcgcgccacggcgcttgccgaggagaagttgtcctcgtttgccgcaagaaatgtcgtcagatcaggggcgtccatcagctcactgcgcagattatccgtgctttttcgtgccatatcgatcttcatccatcttccgcctttacaaaaattcaagtccccagtataatacttcatgtttattttaccgttttcaacaggcgaaaacaatatgctggctgcatagggtgtgaaatttatgacgctgtacgagagctttttggaggctgtgacaaccgaattcgacacgctccgcgtgctgaagcagagcccacgcggcacggtcagcgtcgtgcggcataagaaaagcggcacgcgctatgttttccgccgctacagcggcagcggcgaggtctatcgccgtctgctgccggtgctgtgcccgcatctgccgcagatcatggaagcggcggagcaggacggtcaaaccgccgtgctggaggaatacgtgcagggcgacacgctcgcagagcttctgatgggggcacggctcacggagagggaagcgcggcaggtcacgatgcagctctgccaagcactgcatgtgctgcactcgatgggcgcggtgcaccgcgacgtcaaaccggaaaacgtcatcctgcgcggcagcgacgccgtgctcatcgactttgacgccgcgcgcatctacaaggtcgcatccgagagcgacacgcaggtgctcggcacgacgggctttgccgcgcccgagcagtacggcatcttccagtccgacgagcgggcggacattttttcgctcggtgtgctgctcaatatcatgcttacgggcaagcacccctcgcgcaagatggcggcggggaaaatgggccgcatcgtgcgcaagtgcacgatgaccgcgccggagcagcgctatcagagcacgcgagcgctgatggaggtgctgtgagatgaattttgaggaaaagcactgtccgcattgtggcgcgctgcttgtcgaaaacgcttcgttctgcccctactgtgaaagcgtgctgatcgaaaagcgccctgcggaaatgccaaagccgaaacgccgcaggcgcatcaccgcggcgatcctgctaacggcggtgttgttggtgacattaacggcggttggatttgccaaccgaggaaaggtcatcgacgcgcagggcacggagctcacctacgaaacggacgggcagacattccatctggcgctgagctttgaatcgcagggaggcgcgccgtttttcggccagccgcttttcaccgtagaggtccgcgaggatcaggtgcgcggccaggtgtcgagctcccgcgtttttgtggacaatggcggcggcgtggacaagaagaatgaatttctcgcccttgtggatcactacgaggtgacgaccacgccgtgcgatggcatcactcttttgcagatcgacgagacatgcatcccgacgaactccaacgcggcgatcgaggctatcccgagcttccacaccgagcagctcaaggagggggagggcaacgtcatctggacgatctacctcaaaaacggcgacacgctgcgtctgcgccacacagtcaagatcacgcgcgtcccggtcgtgacgctgaccgaaaatgactacccgatggcgacggtcgacgatctgaacgcgctgctcgacaccctcgcgcacgaggcggatcgaaagtcggtctacattttgcagctgcccgcggtgacatacgagggtggactgacgatgaaaaatttctgctgcgacctggtcggcagcgagggcggcacgaccttcaccggcacggtgacggtcgcgacgcgcggcattcacccctcaaacatcacgaacgtccgctttatgggcgacagcacgggcatcggcctttcggcgagcgaaggagcattcctgcaccgctgcacgtttgaaaactgggagatcggcgcttacggcggcctcggcagctgggtcaacgccacgggctgcacgttccgcggcaacggcgtggggctgtggctcgacaaccgcggcggcgcgacgtgctcgggcagctactatggcgacagcgtgtacgaagataacggtaccgccgtgcgcatcgccgcaatgccgggcacggagacgctggatttcaataactgcgtgttccgcggcaacggggtaaacgtcgaaaacacggcggggtacgccgtcgacctctcgcagatcgtaacggtggacaattaaagagaaaaaggaggaaacgcgacgtttcctcctttttttgcaaagggtatgctcccagcatattgttttcccgcacggaagcgtgtatgctaataaagaatgcacagaccccggaaatttgtaggaaatgaggagaacacacatgaagcatagagcactgagcatgctgttagcgctgttgatggtagtgagcctattacctatcgccgcggtagcggggaatgaggaagtgagcgcgaccgcacatgagggaaaacttgaaatgcggtataatggttcatatggcaatggaaagtatatgccagccggtgaacataaggtggaactgcgcctttggcaaggtgacgaaaatggcaccgaatataagctgcaagaggcggacaaggactatctgcattgtggaggcgccgttaaaaatgtacaatatacggcgacaacgcagggggaggacggagaagaaagtattccgtgctggacgattcaactcgagggaaacgagggggatgccggatacattgagtatagcgctgaaggcatcagtatgagtcgagtcatgatcacgcttcaggcagcaactggtaatgacgataagagagtgaccgaagaggatgctgttagcacggaacctgatgacggcccccaagtgctgtttgaggatgataataccacctattatcttggtattgctgagggaaatcgcctttttggctctgacggtggctgtgatttgagcaacgatacagattcctgcagttttgcacttgttgcgcaggtatttacgctggtaggcggagactataaaccggtcagtgatgaagtgcgcgaaaaattgagtgcaaagtacgattttggtttacaaattcacgcaacagaaagctgtgtggaccactattaccctgagcttgggaacgacggcgtttataggtttacgacaaaatcgcttggagactggatttttgaagcgagcgccacagaaaggaataataatcagagcgttacttataaggcgcggctgacgattgcactgaaaagaacacaggcagagggtgtccttggaatgagcgacggtggtgactttgtaaaggaacttgaattttccgagggtgagcacaacgttatgcttgctgttggcaccgaaagactgagaagcagagatgtaattagtgcaaataatgaacccgcagatgggaaactgacgtacggtggagcggtcaaaacaattgagtacgtaggtggcccgtggtggaggatcacgctggaagattcagaggaagctgactccaaaggctggatccagtacggcgcggacggaagcaaccgtgtgaccatcaccgtcaagccctcgcacggcggcgcggtggataagaacgaccccgaaacgaagatttacaagcaggacagcgttgagtttgattgggcgagctggggcacggtcatgccgtttccgtggcatgatgagacgtactaccttggcacggcagagtggaagccgaccatcaatcagatggcaagcccatatgcgggacaacgcggcgtgaatgaggccgaggcattttacgcggcgtgtgtatttgaactcaagtccggtgaagcgggcaatgggaacgcgacctatgcactgcgtgaggatatccgcaaggcgatgatggatgcgcactatcggttcgagttgaccctcgtgccgacggacatcggctgcgactactatcccatcatggaaacggtgcagaaaaccgtcatctgggatgagagcagcggggaaaacggaaggctgacgtctgaatggcaggggcagaaattctcgaaggattctgtcggcctctgggtctacgatgcgcgtattattgacccagacggaaagcagtaccagcagaatctgagcaactgtaagtacagccacactacgagaaccgaggtgtcgctggaaggcaacagcgtcgaagggatcaatcgacagatcagcgatgtgatcggcaatggctctgaacaagcgggcaacggcctctatgacggcatgatcacatttatcctgccgagcggagaaattgagggccagatcgtgatcccaaagacggactatatgatcagtgtgttcggcaacggcttggaaaacggcagcatcacaactacgatcaaaggcggtatccgctttgacaatgataacaccaaccatgtcggctttatccactttattggcgccggaaaaaataaaatgtgggcgaatgcggaaaagaccatcctcaatgaggcaatcagcggtatcggtcagggcgcacccgagaactgcgtctttgaagagtatgatatcgccatccatagtttgacccgtctgtcgtggggcagccggaattcggtctatctgaacaacaacgtggctatctgccagaacagcacaaacggcggacagccgtttatgcagaacaactggtttgtcggcaatgcgatcgcggtgatgctgaaaaaggtccctgtggtgggtaacctgcggacgttccaaaatcgatttgtcaacaacgaaatggatttttgcaatgaaacgggaaagccgttcgacagcaaaacggagagcgtcctctgggtgtcggagaatttcttctaccatgatagcagctggcagccccaaaagtctgatttgtggagcgaaaagaatggcgtgatttacctgaactataacagggaaggaatgctgctcgttcctaatgcaccgtcctttgacgaaacgggtgattataaggatgatatagaggcctacaaggcatttctgccgcgctttggcggctggacgccggtatatgcctatccgctggccagaacgcagttctgcgatacgttcttctatcccaaccgccgcgacccgagctattgcccgcagtggtggtcggacagtgatccctactatccctcttatgtgcggcaggggagcacgatcagcacgtctgagctggacgggctgcgcttcagctcctacgacagcgcgagcgatacggcggtcggcacgtttgagttcagcgcttcggccgctgagacggaaaattgaggaggcggcatatgaaaaagttactttcctttctcctggcgctgacgctgtcgttgagccttgcgaccttcgcgctggcggacgataacggcggcagttccgcgcagttcgaccctgaggtgaccgtggaggaaaacggcagtacgatgaccgttacattgagcagtaagggtgcaaacgatgaaattctggcatcgaaacgacccacgctgacggtggcctgcgactacgcgcgcgcagtcgttaccgatccgaacggtgttcggatcgaatctaccctctcaggcggaaagatcagctttaccgtcacgatgggcggcgagtatacgatcacgaggatcggcacgtccgtaccctcgtcgaagcccgcggataacggcaaaaccgacgagccgcagccagacgatgggaattatgtcaacccctatcccgacgtgcaggcgggtgactggtacagcggggccgtgcagttcgtcaccgaggaaaagctgatgaccggcacgggcaagggctttgagccgaacgccgctacgacccgcgcgatgctctggacgattttggcccgcatggacggcgcggacatgaacagcacgggtgcgtggtatgccgccgcgcaggattgggcggtcaagcatggcgtatccgacggcacgagctcggacggcaagatcacgcgcgagcagctcgcgacgatgctctaccgctacgcaaaagagcgaggaatggtcaaggcggacgcgcaggcggatctcagcgcgtttgccgatggagcaaacgttagtccttacgcggccgaggcgatgcgttgggcagtcgcagcaggcattgtgaacggcatggatggaagtctcgtcccgcaaggcgaagcgacccgcgcgcagatggcgacgatgctgatgcgctacgcaaagctcgctgcataaagcgagaacaaaatgaaaaaggagttcctcttgaaggtaagaggaactccttttttgcaaaattcagatatttagcacaaagtgctctttatgatagtccagcaggctttcctttttcatttttccgagctcgagcgataatccgctgcgctcaacggcgagaaagtccgcgagctgctggcgggagaacgggatgtcaaactcgaccgcgccgcgccgctgcgcctcagcggagagataggacatgagcttggcgcgcgtcgtgcgctgggcgatgtgcgtgagcttttcattgagcagcaggttttttcccgcaaggtcgctcagaaggtttcggatgatgcggctgtggtgcgcgcaggcggagggacagaccgtcaaaaggcgcttgacgttcaaaaacagcaccgccgtcggcgtttcggtcacgacgctcacattggagacactgtttggcgcgcaggcgaaggccgcggcatacgtctgccccggcgcggtgcgggagagaatgttgcggttgccccagatatcctcctgcacgacgagcgcgcagccggagagcaccatgccaatctcctcgaccgcatcgccgggacggaggagaaacacatccttggggaattgctcagtctttgctgcaaggcaggtgagcatcgcgtcgagctcgttctccgtgacgccggaaaagagcggcgaggcggcgagaatggaaaaaaattctttcataaaaaacgcctttcgttgaaaattcaaccgacttgctggccgcattctactataatacgcttgaaaacgcaaggaggtattgcaatgaaacggagaatcattgagatcgatcaaaataaatgcaacggctgcggcgcctgcgccgcggcgtgccacgagggcgctatcgccatggtaaacggcaaggcgcagctgatgcgcgacgactactgcgacggcttgggcgactgcctgccgacgtgcccgaccggtgcgatttcctttgtcgagcgcgaggccgcggcctacaacgagcaggcggtgcttgaaaacaagcagaagaaaatgcagaaggaggggatgacactgcaccacagctgtcccggcatgcagctcaagacctttgcgcacaaggcggcgagcgaagcggtggttcctgccgcgcaggagagccagctctcccagtggccggtgcagatcaagctcgtgcccgtgaacgcgccgtacttctccggcgcaaagctgctcatcgcggcggactgcacggcgtacgcctacgcggctttccacgagaaattcatcaagggccacattacgctcgtcggctgcccgaagctcgacagcgtggattacagcgaaaagctgaccgagatcatcgcaaaaaatgacatcaagagcgtgacggtcgtgcgaatggaggtcccgtgctgcggcgggctcgagcacgcggcaaagaccgcgctgcaaaatagcggtaaattcatcccctggcaggtcgtgacgatctcgacggacgggagaatactggatacgatttgagtcatcctatgatcgataagaccacagaatgaggaggattttttcggtggacaacaagatgttttgttttcagtgcgagcaggcggcgcactgcacgggctgcatcggcagcgcgggtgtgtgcggaaagagcgccgagacggcaaatttgcaggacgagctgaccggcgcgctcatcggccttgcccgcgcgacggacggcagccccggcgtgaacgagggcacatggagcctcatcatcgaggcgcttttcaccacgctcacgaatgtgaactttgacgaagcggccatccgcgatgtgactgcacgcgtcaaggcggagaagagccgtcttgtgccggactgcgcgtcctgcatgtcaccctgcgggcacaacaatgactacgatgtctcgcggctctggacggcggacgaggacatccgcagcctcaagtcgcttatcctgttcggtatccgcggcatggcggcgtacgcctaccacgcgatggtgctggactatacggacggcgaggtcaaccgcttttttgccaaggcattgtttgccatcggcgaggactggggcatggatgacctgctcccccttgtgctggaggtcggcgagaaaaactaccgctgcatggcgctgctcgacaaggccaacacggagacctacggcacgccagagccgaccaccgtgccgatgacggtggaaaagggaccgttcatcgtggtttccggccacgacctgcacgacttgaagcgcctgctcgagcagacggagggcaagggcatcaacatctatacgcacagcgagatgctgcccgcgcacggctacccgggccttaaaaagtatgcccatctcaagggcaatttcggcacggcgtggcagaaccagcaaaaggaatttgccgacattcctgcgcccgtactattcaccacgaattgcctgatgccgccgaaagcgagctatgccgaccgtgtgttcactacggcggcggtctcatatccggaactcaagcatatcggcgcggacaaggacttcacgccggtcatcgaaaaggcgctggaactgggcggctatgccgaggataaggcattcaccggcatcaacggcggcagcacggtcacgacgggctttgcccgcggtgcggtactgggtgtggccgacaaggtggtcgaggccgtcaagtccggccagatccgacactttttcttagtcggcggctgcgacggtgcgcgccccggcaggaactactacacggaattcgtcaagcagacgccgcccgacaccatggtgctgacgctggcctgcggcaagttccgcttcaatgacttagatcttggcacggtggcggggttgccgcgcatcctggacatcggccagtgcaacgacgcttacagcgccatccagatcgcgctggcgctcgccgacgcctttggctgcggtgtgaacgagctgccgctttcgatggtgctctcgtggtacgagcagaaggcggtgtgcatcctgctgacgctgctgtatctcggcatcaaggacatccgcctcggtccgacgctgccggcgttcctctcgccgaacgtgctcgactaccttgtcaagaactttggcatcgcgcccattacgacgccagaggaggacctgaaggccattctggggtaaaactgaaacgtaccggcgggcattttgcccgccggtattttttgcagagaaagaaacgcaaaaattaagcgtgacttttgacgcgagatctgataaaataaaacaatcttgcgcaacagcgggggaaagagagaaatcaacaggagagatcaatgaaaaaacagtttgacctcagcgccgcggcgctgcacattttagcgatggccttcatgctgctcgaccacctgtgggcgacgctttttctttcgcaggagtggatgacctgcgtgggacgtctcgcgttccccatttttgccttcatggcggtggagggctacttccacacgcacagtttcaaaaaatacgcgcagcggatgctgatttttgcgttgctgtcggaaattccctttgacctgatgtacggcggcacgtggttctaccctgtgcaccagaatgtcatctggacgctgctcatcggtcttctcggcattcgggcgatggaggccgtgcgggaaaagaggaagacatggctctatcttctgacttgcgttgcggtcacggtgctgggctttgcgctcggcacgctcggcatggtagattattacggcatgggcgttttgacggtgtttgtgttctatttcctccgcggcagagagtggtggaagctgctcgggcagatcgcggcgctctattggatcaatgtgtcgctcatcggaggacagattttcccgatcgagcttttcggactggagtttgaggtctgcgagcaggggcttgcactgctctcgctcgtgcccatctggctctaccgcgggcggcagggacaccacagcaaggcgtttcagtatgcctgctacgcgttttatccggtacatatgctcatcctcggccttatccagctgtctctgtaacagaatacgaaaaaagcgctgccgaaaggcggcgctttttcgcgctcttttcggaacgttcacaatttgtttattgactttgcaaaggaaacaactataatgatgacgttctaaaattagaagattatcattcgatgacgagcgagcgcggcgcgtgaccgaatgaggtcggaaaggaaccgatatgatgccgaaggaaccgatgcgcggggcgacgcttttcagccacgccaacaagatgacaaaggcttatcatgttatgttaactccactgtgcaaggaggcaggcctgccgccgctggcgctggacattctgctctttctcgccaacaatcccgagcacaacacggcgaaagacatctgccgtatgcgcgggcacaaatcgggtattgtctccgtgcacgtggaaagactggtgaatgacggccttcttgagcggcaggagatgccgggcgaccggaggcagacgcggcttatctgcaccgaacaggcgcaagcgctcattgagcgcggacggcaggtgcagtggcagttcggaagacgtctgctcgagggcatcccggaggaggatctggcgacgatgcgccgctgtcttgaaagaatggatggcaatctgaacggcatctgcaaggaaaagcgctgagggcccaaagaagaaatcaggagaaacaacaatgatcaaactactcaaaaacatgcgccgcaaagaggtgctcatggtgctgctgtgcaccgtgcttgtggcggtgcaggtctactttgacctgcggctgccggattacatgaccgatctgacgacgctcatcaaaacgtcgggggcgacggcggatatcctgtccgtcggcgtgaaaatgcttggctgcacgctcgcaagcgccctgctggccgtgggctgcggctatcttgcggctaaggcggcgtcgggcttcagcttcacggtgcgcgaaaagctcttccgccacgtgatggacattggcagcgaggagatgcaggatttttccgtcgccagcctcatcacgagaacgacgaacgacatcacgcaaattcagatgatcgtggcgatgggcctgcagatgatgatcaaatcgccgatcatggccgtgtgggccatcatcaaaattctcggcaagagctgggagctctccgccgtgacagcggcattcgtcgtggtcatctgcgtgacggtgataacggtgatgagcatctgcatcccgcgttttcgcatcgtgcagaagctgaccgaccagatcaaccgtgtggcgcgcgaaaacctgacgggcatcaacgtggtgcacgcgttcaacgccgagcagtaccagaacgacaagttcaacaagccgagccttgacatgatgaatgtgcaggtaaagaaccagaagctctttgccctcgtccagccgacgatgacgctcggtatgaacggcctggcgctcacgatctactggctgggtgcggcgctcgtcaacaacatcgcgctgaccgattccgcagcgcgcctcacgatgttcagcgacgtgctggtgttcagcacatatgcgacttacgtggtcatgtcctttatgatgcttgtgatgatctttatgctgctgccgcaggcgcaggtctcggccgagcgtatcaacgaagtgctcgagcgcaaggcgaatatccgcgagggcagcgtgagcgaatgcaaagagcacggcacagtggagttcaaaaacgtctcgttccgttatccgcacgcatcggaggatgagctttcgaacatcagcttccgcgtgaacaagggcgagacgcttgccgtcatcggcgcgacgggcagcggcaagacgacgctcgtgagtctcattccgcgcttttacgacgcgacagagggtgaggtgcttgtcgacggcgtgaacgtcagggactacacgttcgatgccctctacaacaagctcgggtacgtgacgcagaaggccgtgctctttgccggcagcatccgcgacaatgtttactttggcgagagcgaagcgccggtggacggcgagggccttgcgcaggccgtcgagctttctcaggcgaaggagtttgtcgacaagctccccgacggcacgcagcaccatgtggcgcagatgggccgcaacatgtccggcggccagaagcagagattgtccatcgctcgcgcgctggcgagaaagccggagatcctcgtcttcgacgattcgttctccgctctggactaccgcacggatgcgaagctgcgcgagggactatccaagcagctgcacgacacgacgaagatcatcgtcgcgcagcgcatcagcaccatccgccacgcggacaagatcatcgtgctcgaccgcggcgaggctgtgggcatcggcacgcacgaagagctgatgcggaattgtgacgtttaccgcgagatcgcgacctcccagctcagtgctgcggagctcgcgtaaaggaggtgagagaagatgaaaaagaaaaacagcaatcccgtcggcgcgctcaagcgcacgggcgtctatatgaaatcgagccttggcgtcatcgctcttgcgctcgtgctggcggcgctgagcgccgtgatgacgatcatcggccccgacaagatcggcaaaatggcgaccatcatgtccgacggcctgttcaccggtatcgacctcgccgccattgcgaagatcggcgtgttccttgccattatttactgcctgagcgcgctgtttggcttcatccaacactatatcatggcggtcgtgacgctgaaaatgtcctaccgcatgagaggtgagctctcggaaaagatcaaccgcgtgccgcagaagtatttcaacaccacctcgcagggcgatattttaagccgcatcacaaacgatgtgtcaacgctccagcagggacttaccaacagcctgccgaccatcatcagcgccgcgacacagtttgtcggctgccttattatgatgttcgtgaccgaatggcgcatggcgctcgtcgcactgtgcatcacgctccttggcatggtgctgatcgtcgccatcatgtcgaagtcgcagcgctacttcaccgcgcggcagaagagcctcggcgagctcaacggctatgtcgaggagatgtattccggccatgaggtcgtgcgcatcagccgcgcggtcgataaggtcctcgaccacttcgacggcctgaacgcggcggtctatgacgcaaactggcgctcgcagttcctctccggtgtgatgcagccgctcatgaacgtgatcggcaacctctcgtatgttgccgtgtgcgtgttcggctcggtgctggccatcaatggcacgatcgaattcggcgtcatcgtctcgttcatcctgtatgtgcgcctcttcaccacgccgctgacgcagatcgcgcagggtatgacgaatttgcagacggcctcggcctctgcccaccgcatctttgactttttggagagcgaggagctcagcgacgagagcggcaagacagagaagctcgataccgtgcgcggcgcggtgacgttcgaccatgtgcgcttcagctaccccgattcgcccgacaagatcatcatcaaggatttctccgctgaggtccatccgggccagaaggtcgccatcgtcggccccaccggcgcgggcaagaccacgatggtcaacctcctgatgcgctttttcgaggtcaacagtggccgcatcacgatcgacggcgtggcgacgaccgacctgcgccgccccgatgtccacaagctcttcggcatggtcctgcaggacacgtggctctttgagggcacgatccgcgagaacctggtctataacatggagggtatcacggacgagcagctcgaaacggtctgcaaggcctgcggcctcgacaaatttgtccactcgctgccacagggctttgacaccgtgctcagcgagagcacgaccatctcggcgggacagaagcagcttttgaccatcgcccgcgcgatgctccagaatgcgccgatgctgatcctcgacgaggcaacgtcctcggtcgatacgcgcacggaacttctcattcagcgcgcgatggacgagctgacgaagggccggacgagctttgtcatcgcccaccgcctgtcgaccatcaagaacgccgacctcatcctcgtgatgcgcgacggcgacgtcatcgagagcggcacgcacgagcaactgatggagcaaaacggcttctacgccgagctctacaacagccagttcgcgcaggcgtcgtaaagaaaaaccagcgcaggtgagcctgcgctggtttatattttctgcggaagaagttaaaagaaagtttattgctgaaccgggaaacggtggtataataaggagcattcgagggctgacaaagcccgcaccgcgaaaggaagcggaaacatatgaattggtttcaggaattgctgtcgaatccctttttgctcatcggtctctcgtcgtggttctgggcgcagctcatcaagacgatcatccatgccattgtgacgaagagcatcgactttacgcgcctcatcggcgacggcgggatgccgagcggccattcggccacggtctcgtcgctcgcgaccgcggcggcgctcgtctacgggctcggttcgtttgaattcgcgatggcgttcatcttcgccatcgtcgtctgcaaggacgcgatgggcgtccggctcgaaacggggcgtcaggctgtcatcattaacgacatcgtcgaggccttcaactcgctcgcgtcggaaaagcttccggaggcgaagctcaaggagtttgtcggtcatacgccgctgcaggtcatcgccggtattctgctcggcgtggcgaacacatttatcatgtactactgcgtactgtgagggaaaggacatgacgctttttattaactgctgcccgcgcggagagtcgcgcacggaaagactggctcgcgcactgcttaaagcgctcggcgaacacgaggagctgcgcctttatgacgagccgctgcacccgctggggcgcgcggacatcgcaaagcgcgacgcgctgctcgcggaaaagaagtatgacgatgaaatgtttcgttacgcccgtcagttcgccgcggcggacagaattgtcatcgctgcgccgctgtgggacctgtcgtttcccgcgcagctcaaggtgtatctggagaatatctatgtcacgggcatcgtgacgaagtacagcgaggcgggcgagcccgtcggcctgtgccgcgcaagcgagctctactatgtcacgaccagcggcgggccgtttgacggccgctttggctacgattactggaagaccattgcgcaggactgcttcggcattccgaccgtcaagctcctggaagccgaaaacctcgacatcgtgggcgcagacgcggaaaagatcgtcgacgatgccatcaaggcctacggccctgcgtaaaatcaaacttgtatagcaaaaagctccgtgccttggcacggagcttttttatcgggaaaaatcagttagcgctgctctgctcgctttcgggcaggaggttcgtcatgctcttgaggccgatggcgagcgtggacatgttgtgcagcagcgccgaggtcgtcggcggcaggatgccaagcacgccaagcacgatgagcgagaagttgaagctcacgatgaagcggtagttgcggtggatgcgggccatgagctcctgactgagagagcgcagcgtgacgagcgcaaacagatcttcggacgagatggtaatatccgcgatctcgcgcgcgatggcggcgccggtcgaaatggcgatgcctgcgtcggcttcggacagggcgggggagtcgttcacgccgtcaccgatcatgatgaccttgcggcccgcggccttttcgctgcggacgaacgcggccttgtcctcgggcagcacttcggcgtagacggcgtcgacgccgacctcagcggcgacggcttcggcagttttgcggctgtcgccggtcatcattacgaccttgtcgataccgagctcgtgcagcgcgcgcacggcggctttcgcctccttgcgcagggggtcatgaatgcagatgaccgcggcgagctcgcccgcgatacagaggtacaggtgcgaatactcgggcgggagcgattcaaacttgtcctcttcgccctccggcacgcggcatccctcgtcctcgaagacgaagtgtgcgctgccgatgagcactgttttctcgtccaccatgctcgaaatgccgtgcgccacgacgtactggacctgagagtgatattcctcgtgcgtcaatccgcggtccctggcctcggccacgacggcgttggcgatggaatggggatagtgctcttcgaggcacgcggcgaggcggagcatctcgctctcctcattgccgccgaaggtgacgattctcgcgaccttgggcgtggcgtaggtgagcgtgccggtcttgtcaaagacgatggtgttcgcctgggcgacggcttcgaggaagcgcccgcccttgacggagatgtgatggctgctgctctcgcgcatggcagagagcaccgcgataggcatggagagcttgagcgcgcaggagaagtcgaccatcagcacggccagcatcttcgtgacgttgcgcgtgatgagataggtcaggatcgtgccaccgagcgtatagggtacgagcctgtcagcaaggcgcgaggccttgtcctcagccgtggatttgagcttttccgactcttcgatcatgcgcacgatgcggtcatagcggccgccgccgagcgccttttccacgcgcacgacgcactcgccctcttcggcgaccgtgcctgcgtagacatagctgccctcgcgcttggggacgggcatggactcgcccgtcatggacgcctgattgaccatcgcctcgccggagacgaccttgccgtcgagcgggatgaggctgccggtgcggacaacgacgcagtcgcccgcctgaatatcgccgatgggaacgagcgtttccgtctcgcccgtcttgagccagacgtggtcaacgttgagcgacattgcgcccgcgagatccgcgacagacttcttgtgcgtccagtcctcgaggatttcgccgaggcggagcatgaacatcacagagcttgccgtcgagaagtcgccgcgcaccatcgacacggtgacggcggtggcgtcgagcacggcgacggagagcttgccgtgcagcagtgcggaaagaccctcgcggatgtacttgatcgagtgatagatggcgagcgccgtggtgacggggagcgggaagaagagcttcgagatcacgcggcggatcaccgtccacgagagtttgtcttcaaattcacggttgagtttgcgcgtcgtatggtcggggacaaggtccatcgtttcggccttgtcgaacgagaacgccgcgagcgcgtgcacgagcgcggcgcggtccgcgcggtaaacgatcacggcgtcctgcgtgcggtcaaagaccgagacctcgctcacgccgtccacactgcgcagataatattccagaacgtccgcctgatgcagcgtcatgcggcggcaattcagatgcacgcgcatgcgtccggcggattcgtgcagaattttgcatttcatagtgtatcaattcctccgaaagtgaaagagagccgcgcgtcgcggctctcctgcgatttattcctcgtccgctttttcctcggacgcgtcctcaatgacttcggcgtcctcttccgctgcgcggcgctcgttgatgtccttggcgtcggcgtagacgtcctcggcatcctcacggacgttcgtgacggcctgcatcacgcagtccttggcacgcagcaccgcggcggtggtgtgagagtagacctttttggcatccttgctggaaaggatcttgaggccggcggtgccgaacagcacgcctgctgcaaataaaccgagatgtttcattgaaaaaacctcctgttagtatgaattagagctctttaacatagtgggaatataacataacgccttttcaaatgcaagtagcgaaatgttaaaatttgacggagaatggaaaccgtggatttgttatgtttttctcagatgttcgcgcgctcgtcccagagcgtcagcgtacctgattgcagcgttttcggaacgtcgatgatgcgctggttcgacgagccgcgaaagcgcagcgagatatcgtgcagcgcgtccacatagcgcccgtcgacgagcacatcgagcagtgacagcagttcgtccgtcacctcgcagcgcgggtatgcggtggggtcgtgcagctcctcccacgtaaagcccgtgaacgaccagatcgtcttttgcggcagctcacgcctcacgcggcggagaaacggcagcagtgcgcgctgatttttaggctcgaacggctcaccgccgagcagcgtgaggccgttgatatagtcgggggagagcaggcgcagaagctcatcctccgtctcgcccgtaaagggcttgccgtagcagaagtcccacgtctgcggctgaaagcagttttcgcagtggttcgtgcagccggagacgaacagcgtcacgcgcacgccaaggccgttggcgatgtcgcagtttttgatctcgccatagtgcatgggaaatgacctccttatcaaaaaaggtgggagcacggtgcgctcccacccaaacagcaattttatggcgcagccttacagatgcagcacgcgctctttgatctcctgcgtgcggccctgattccagaactgggtgccgatgtagccgcaggtacggcgggcgacattcatcttgtcctgatcggtgttgccgcacttcgggcagcgccagataagcttgccgccctcctcgacgatgtcgatctcgccgtcccagccgcagacctggcagtagtcggacttcgtgttgagctcggcgtagatgatgttgtcgtagatgaacttcatcacctgcaaaaccgcttcaaggttctgctgcatgttgggcacttcgacatagctgatcgcgccgccgggggagaggtgctggaactgcgcctcgaacttgagcttggtgaacgcgtcgatcttttccgtcacgtggacgtggtaggagttcgtgatatagcccttgtccgtcacgccctcgatcacgccgaagcgcttttgcaggcacttggcgaacttgtaggtcgtggactcgagcggcgtgccgtagagggagtagtcgatgttttcggcggttttccactccttgcacttgtcgttcatcttctgcatgatggagagggcgaacggcgttgcgctggggtcggtgtggctcttgccggtcatgtacttcacgcactcgtaaagtcccgcgtagccgagcgagatcgtggaatagccgtcgtagaggagcttgtcgatgggttcaccctttttgagtcttgcgcacgcgccgtactgccagagaatgggcgccgcgtcggagagcgtgcccttcaggcggtcgtgacggcagcgcagcgcgcggtggcagagctcaaggcgatcttcaaaaatcgtccagaacttttcaatgttgccgccggaggagagtgccacgtcgggcaggttgatcgtgacgacgccctgattgaagcggccgtagtacttgtgcttgccgggaacatagttgccggcattcgcgatgttgccgacgcccgcgtcggtgaagcggtcaggcgtcaggaagctgcggcagcccatgcagggatacacatcgcccttgagctcgagcatcttcttctcgctgatgtagtcgggcaccatgcgacgtgccgtgcacttggcggcgagctgtgtgagataataatacggcgagtcgtcgtgaatgttgtcctcttcgagcacgtagatgagcttggggaaggcgggcgtgacccacacgccctgctcgttcttgacgccctgatagcgctgctcgagcatttcctcgatgatgacggcaaggtcgcgcttttcctgctcgcttctcgcctcgttgaggtacatgaaaacggtgatgaacggtgcctgaccgttcgtggtcagaagcgtcacgacctgatactggatggtctgcacgccgcggcgaatctcctcgcgcaggcgcttttcgacgatttcggtgatcttgtcctccgtggggtcgacaccgagggcctcgacctcggcgagcacctgctttctgatcttctggcgcgatacgtcgacaaagggggcaaggtgcgtcagcgagatggactggccgccgtactggttcgaggcgacctgcgcgacgatctgcgtcgcgatgttgcacgcggtcgcgaacgaatgtgggcgctcgatgagggttcccgtgatgacggtgccgttttgcagcatgtcctccaggttcacaaggtcgcagttgtgcatgtgctgggcgtagtagtccgtgtcgtggaagtggatgatgccctcttcatgcgccttgacgatatcctcgggcaagagcagccggttcgtcagatcacggctcacctcgccggccatatagtcgcgctgggtggagttgacgacggggttcttgttggaattctcctgcttggcctcttcgttgttgcactcgatgagggagagaattttgtcgtccgtcgtgttgctcttgcgcacgagcgagcggttgtagcgataagtgatgtagcgcttggcgacctcgaacgcgccgtgcgccatgatctggtgctcgacaaagtcctggatctcctcgaccgtgggcgcgcggccaaggctctggcaggagagctccacgctctcggcgatgcgctggatctggacgggcgtcatgcgagcctcctcatccacaacgttgttagccttagtcactgcggcgataatcttgacgatatcaaattctacttctgcgccgttgcgcttgataactctcatgtattcccgtctcctcttcttttggtatgtcctttacataacgcaacactacatcttgtggtgatcttcataactgcaaactaattattgcacatgaggctcagcattgcaagtcctaagtgctgaaaaaggaaacaatatcagagccccaactttggacactattgacgaaacaccttgaatgaagcggaatagcgcattatttcaatttgacgcaaaaatcaacaagacataagtaatgctaatgatagctatgcaaaattaactcttttcatgggcggaaaatgtgactataataactcggttgaaaaatttgagcaggactcgtagagcgggcccgctccggatcggaggatcaatacaatggcaaattgcgcgatcgtaggtatcaactggggcgatgaaggcaagggccgcatggtcgactacctcacggaccattatgacgtggtcgtccgctatcagggcggcggcaacgcgggccacactgtggtgaatgaaaagggcaagtttgccctgcacctgctgccgagcggcattttccgcgacggcgttgtcaacattctgggcaacggcgtggcgctggactgcgaaaacctgctcaaggagatggagacgctgcgcgccgcgggcgttatcatcacgccggagaatttgaaggtcagcgaccgcgcgtcgttgctgctgccctggcaccgcgagctcgacgcgctcgaggaagcgcgccttgccgacaagaagtacggctcgaccaagcagggcattgcgccgttctatggcgacaagtaccagaaaaagaccgtgcaggcgggcgagctcctgcaccccgagcacttaaaggagcaccttgccgaccttcttgagtggaagaacctgacgctccagaaaatctacggcgcaaagggctacacgatggacgagctcatggcgtgggtcgatacctactgcggcgccatcaagccctacatcaccgacaccggccgtttcctgagaaacgcgcagaaggagggcaagtccatcctctttgaagcccagctcggcgcgctgcgcgacctggactacggcatctatccctacaccacctcttcgaacgccgttgcggcgtatgcgcccgtcggctcgggccttcccacggcgaagctcgacgaggtcgtgggcgtggtgaaggcgtactcttcctgcgtgggcgagggcccgttcgtctgcgagtggttcggcgaagaggcgcagcagctgcgcgacgcgggcgcggagtacggcgcaaagaccggcagaccccgccgcgtcggccctatcgatctggtcgcgacgcgctacggcgtggagacgcagggcgcgacgaacatcgccctgacgaagctcgatgtcctgagctacatggacaagatccccgtctgcgcacactatgaattaaacggcgagcagaccgacgacttcccgttccccgtgctgctgcaggacgccaagcccgtcgtcgagtatctgcccggctggcagtgcgacatctccggcgcgcgcaagtgggaggatctgcccgaagccgcccgcaattacgtcgaatacgtcgaaaaggccatcggcggccacatcggcttcgtctccgtcggcgcggagcgcgagagcctcatcatccgctgacacaccaaagtaaagaggggacgaaggccccctctttacttttctattgcaactttgcttcattctatataaaatacgaacagcgaccgctgagaaagaaaaggagaaccctatgcgcaaggatatttacgagtccccgctttcgtcccgctatgcgtccgaatacatgctgcacctcttttcccccgatatgcgcttccagacgtggcgcagactgtgggtggcgcttgcccgcgccgagcacgagctgggcctgccgatcacgcaggagcaggtcgacgagctcgccgcgcacatcaccgacatcgactacgaggtcgccgaaaagcgcgagcacgaggtgcgccacgatgtgatggcgcatgtgtacgcctacggcaaggcggcgccctccgctgccggcatcatccacctcggcgcgacgagctgctatgtgacggacaacgccgatttggtgctctatcgcgacggcctcaaatacctgagagggcagcttctcagcgtgatggtgaatcttgcggcctttgcccgcgaatacgccgccacgccgacactcggctacacgcactatcagcccgcacagcccgtgacgatcggcaagcgcgcgacgctgtggatgcaggacttccgctcggaccttgaagagcttgattttgtcatcggctcgatgcgcttcctcggctgccgcggcacgacgggcacggaggcgagctttgtcgacctcttcgagggcgacggtgacaaggtcgacgaaatgaaccgccgcatcgccgcggagttcggctttgaaaagtgcttctctgtcagcggccagacctatccgagaaaggccgacagccgtattctgaatgtgctctcttccatcgcacagagcgcctaccgcatggcgaacgacattcgcctgctccagcacgaccgtcaggtcgaagagccgtttgaaaagaaccaaatcggctcgtccgcgatgccctataagcgaaaccccatgcgctccgagcgcatctgctcgctcagccgctacctgatggccgatgcggccaacgcgccgatgacggcctcgacccagtggctcgagcgcacgctcgacgactcggccaaccgccgcatctcgctgccggagggcttcctctgcgccgacgcggtgctgcgcctgtgccagagcgtgacgaacggcctgcacgtgaacgagaagatcgtcgagcgcacgctgcgcgagtatctgccgttccttgcgaccgagaacatcatgatggaggccgtcaagcgcggcggcaaccgtcaggaactgcacgagaagatccgccagcactccatggccgcgaccgcccgcatgaaagagggcgagccgtgcgacctcttagaccgcctcgcgggcgaccccgcgttcggcatgacgcgcgaggagctcgatcaggtcatggagcccaagctctacatcggccgctgcgagcagcaagtgctgcgcttcctcgacgagtgcgcgccacttttgcgcgatgccgccgcggaggacggcgcgatcgacctgtaagcgggcaaaaattgagaatgatccctgagcgggagggatggacgagccatctctctcgcttcttttttacctgaaaaaatgtgcggcggcgcgcgttgccttggcaaaagcgggcagaataccagtaagtgaacaaattgtaaagggtgtacgttcctatacaaaaggtagcgagtgtccatggattcgggtatcgaagtgtgctataaagaagctgtaaagaaaagtgcacaagaacgatcactaaattacataacatatttgataaataaatattgatttatttattgaaacaatctataatatggagaagctgagcgggaaacattttcccgccgcagtgctaaaagaggtgaacgacaacatggcaatggaagaattacagcaggtgcaggagctcgaaaaagagcttgcagcgcagtatgccgccgcgcaggcggatgccaagcgccgcatcgccgttgagcagcgcgccgctgcccgagagatcgaggacagccgccgcaacgccgacgtggaggcgcggcagctgatggcggaggccgaacagcgcgccggtgaggagacggaaaagatcctcgccaaggcgcgcacggaatgcgaaaagatgcagagcgcggcgcgcgcaaaccttgagcgtgcggcgcagtggatcgcggaagaggttgtgaacgacaaatggcaatcgtagcaatgaagcatctccgcctcctcggcatggagagcgagcgcgaggcgctgctcaaggccatgcaggacatggagtgcgtggagatctcaagtatcgacggaagcgaagaggcactgaaatcaggctttgccaagcccgacgacaaggcgctgatgagcgcgcaggaagcgtcgcgtgcgtaccgcacggcgcttgcctcactcgaccgctttgcgccggagaaaaaaggcatgttccgcaagcggcagggcgtttcccgcgcggcgtttttcagcgccgagagcgaggaaaatgcccgcaccgcggcggagacgatcaacaaggacacacgccgcctcggcgaaatcgagagtgagcgcacgaaaaatgaggcgctgcgagcgactcttgccccgtggctgacggtcgacgcgccgctcggcggcgcggacggcgcgcttgcggtgttctttggtacggtgggcctgaatgtgacggacgatgcgctcaaagcgctggccgattcgctggacgggcttctcacctggcagcaggcctcgagcgacaggtcgctgcgatatcttctcgtgatgtgtcacgggagcgtgaaggagcgggcgctgagcgcgctgcgcgacctcggcttttcgaccgtgagctttcgcggcatgaccggcacggcgaaggaaaacgacaaggcgcttgcggaaaatctcgctgcgctcgaaaaagagcggcaggagatcgaacagcgcattgtgggccttgggggcaagcgggaggcgctcttggaagcgagcgaccgcgcagccatcgcgctgcggcgcgaggaggcgaagagccgacttgtcggcactgacaaggtctttttattggagggctggctgcccgccaaccgctgcgcggagatcgagaaaacgctcaagccgtttacctgcgcgatcgagacgcgcgagccgacagaggacgagtacccgcaggtgccggtgcagctcaaaaacagcaagctgacgcggccgctcaatatggtcacggagatgtattcgctcccggcctacggcacgcttgacccgaacccgctgatggcgccgtttttcattttgttctacggcattatgatggcggatatgggctacggcttactcatgatgatcgcctcggtcatcatcagcaaaaaataccggcccaagggcacgagcggcgagctgttcagcctgctcggcctctgcggcatcagcacgttcatcatgggcgcgctgacaggcggatttttcggcgatttcctcacgcagctcgtcgccatcgtcagccccggcacggtcttcgcgctgccgaagctcttcgacccgctcgacgatctgacgatgatcctgatcggctcgatggcgctcggcatggtgcagatcgtcaccggcatggccatcagtttgatcgaaaagtgcaagcggaagaaattcctcgacgccttttttgaagagatcacgtggtggatcgtgtttatcggcatcgcgcttttggcgctcggcaagggtgcggcggtgctgtatgtcggatgcgcgctggtgctgctcggccccatcgtgcagggcaaaggctggggcaagcttacgggcgtgttcggctcactctataaccacgtgacgggctacttcggcgacattttgtcctacacgcgactgatggcgctgatgctcgcgggcagcgtgatcgcgcaggtgttcaacatgctcgcggcgatgccggggaacgtgatcgcgttcatcatcatctcgatgctcggcaacgcgatgaacttcgggctcaatctcctcggctgctacgtgcacgatctgagattgcagtgcttggaatttttcaacaagttttacgtcgacggcggaaagcccttccgccccatgacgctggacacggaatatgtcgatttacagtaaattgcagaaaaaacggaaaaaccgtaaggaggataaaaaatgggtatctttgaactgacgacgggcggcgccatcggtatgctgggcgcgggtcttgctgtttgcctcgcgggcgcgggcagcgcacgcggcacgggtcttgccggcgaggccggcacgggtcttctctgcgaggatccgagcaaattcggtaaagtgatgatcctgcaggtcatccccggtacgcagggcctttacggtctggtcatcggcttcctctgcctgatgcgtatgggcgtcctggacggcacgtatgtcgatatgtcgcttcaggagggccttcgttacttcgcggcctgcatgcccatcgccatcggcggcggcatttcggcagttgcgcagggccgcgtcgccgcgggatcgatcaacatcttggcgcgccagcctgaacactggtcgaagggcatggtgctgtgcatcgtggtcgagttctacgcgatcctttcgctgctggcgtcgatcatgatgctgctcaacatcggctgacgcgcccacggaaaggcggaaacgcaatgaacggaatggaaaagatcaccgcgcgcatgaaagaggacgcggcgcgctcgctgagcgagctgaatgcgcagaccgagcaggagctccggcgcatccgcgaggagagtgccgcacgcgcggaaaaagagcgcgagacggcgggcgggcgcgcgcatctcgccgcgcaggagcgctatgagcgcctctgctccgcggcggagatggagacacgcaagctgacgctcagcgccaagcagaaagtgctcgccgagacctacgaccgcgcgctggagatcctctgctccatgccgcgcgaggagtacctttcgctgttggttcgcctgctgaaagcggcgggcggcaagggcgacgagaaaatcgccctgagcgcaaaggaccgcgatgagatcggcgaaacgctcgtcgagcaagcgaacaaggagctgaacgcgcactatacgcttgcgggcgaagcggcagatatccgcgcgggcctcgtgctcgtgagccgcgactgcgatgtgaactgctcgtttgaaacgcttctcgccctttcgcgcgagaagaccgagcgcggcgcggcaaagctcctcttcgcggaataaggaggggatcggatgcagcagtatcgggatacggactacgcagcggtctccgcggcgctgcatgcgcgcgcggcgaagctcctgacgcaggcgatggccgagcggatgatcgacgccgccacgccggaagagagctacaagacgcttttggaatgcggctacgcgccgcttgagcgatgcacgctcgaaaatgtggaacacgcgctctcgcaggcgcgcagggagctctaccgcgaggtgagcgtgctggtgccggacaagcgcatcatcgagctctttcagatcaagtacgactatcacaacgcaaagctcgcactcaagagcaagcgcaccggcgaggacgtctcccgccttgcgatggactgcggccgcttcgacgcgcagaaggtgcttcgcggcgaaatgagtgccgtttccgcggcgatgagccgcgcgatggcgcgggcggagagcgaagtgggccacagcggcgatctccgcatggcggagctgctgctcgatcgcgcctgctacaaggagatgagcgcgctcgcaagcgagacgggcagcacgtttttgaaggactatgtcgccttgcagatcgacgcggtcaacctgcgtacgctcgtgcgcgcacggcgcatgggctgcgaggacgatgtgcttgctgcggcgatgctgccgggcgggcacattccggcgggtcagctcaaaggcgcgcgcggcgatcatttatcgtcgctcacacacggcacgccgcttgacagcgcgggcgagctcgcggccaaactgcttgacagcggcgggggcctgacggaatttgagcgcgcgtgcgacgatgcgctcatgtcctatttgcagcgggcgcggcgcacgccgttcggcccagaggtcgtggcgggctatcttggcgcgaaagaggcggagttcaccgccgtgcgcaccattttatccggcaagatcgcgggcatcgcggcggaggacatccgcgcgcggctgcgcatgagttatctctaagggaggcggcagcatgaataagatcggagttatcggcgggcgcgacagcgttttgggcttccgcgccctcgggctcgacacctgcatcgcggaaaacggcgagcaggcgaaagccgccctccaccgcatggcgaaggagaactacgccatcatttatatcaccgaacacctcgccgcgcagatccctgcggagatcgagcgccggcgcgaggacgtatcgcccgccgtcatcctcatcccgggcagggagggaagcctcggcatcggcacggcgggcgtgcacgcggctgcggaaaaggccgtcggcgcggacattttgtaaaaaaggagcaaaagccttatgggaaagatcgttaaggtctccggcccgctggtcgtggcgtcgggactttcggaagcgaatatggcggatgtcgtccgcgtgggcgagcagcatctcatcggcgaaattctgacgatgagcggcgatagtgccgccattcaggtgtatgaagagacctcgggcctcggcccgggggcagaggtcgtgacgaccggcgcgccgctctccgtcgagctcggccccggtttgatcgagaatatttacgacggcatccagcgcccgctggaggtcatccgccagaagacgggcggcaacttcctgccgcgcggcgaggaggtccccgcgctcgaccgcgagaagaaatgggacttcaccgctgtcgccaaggtgggagaccacctgatcggcggcgacgtgcttggcacggtgcaggagacgtcgtcaattctgcacaagatcatgatgccgcccaagatgagcggcactgtgaaggagatcaagtccggcagcttcactgtggaggacgtcgtcgctgttattgagaccgacaagggcgagacgaaggaactcacgatgatccagaaatggcctgttcgtgtgggccgtccctacacgaagaagtacccgcccgtcacgccgctccagtccggccagcgcattgtggatacgttctttcccgtagccaagggcggcacggcggcgatcccggggccgttcggcagcggcaagaccgtcatgcagcatgcgcttgccaagtgggcggacgtggatctcgtcgtttacatcggctgcggcgagcgcggcaacgagatgaccgacgttctgcgcgagttcccggaactcgtcgacccgcgcacgggcgagagtctgatgaagcgtacggtgctcatcgccaacacctcggatatgccggtcgcggcgcgcgaagcgagcatctacaccggcatcacgatcgccgaatacttccgcgacatgggctatgccgtcgcggtcatcgcggattcgacctcccgctgggcggaggccctgcgcgaaatgtcgggccgtctcgaggagatgcccggtgaagagggctatcctgcgtacctgtcctcgcgcctcgcgcagttctatgagcgcgcgggcgtggtcgaatgcctcggcagcgacgagcggcagggcagcctgaccgccgtcggcgcggtctcgcctccgggcggcgacctctccgagcctgtctcgcaggcgacgatgcgcatcgtcaaggtcttctgggcgctggattcgtcgctcgcctaccgacgccacttcccggccatcaactggctgaattcctattcgctctatctcgattccctgcgcccgtggtacagcgagcatctgggccacgaattcctcgaaaaccgcgagtgggccatggcgatgctgcaggaggagtcgaacctcaacgagatcgtgcagctcgtcggcaaggattcgctcagcgcgaaggaccagatcacgcttgaggtcgcgcgtatgatccgcgaggactttttgcagcagaactcgtttgccgacaacgacgcctattccgaatacgaccgacaggcgcgcatgctggcgctcatccgccagtatgacacgcaatgcctgagcgccgccgagcgcggcgggaatttaagcgagctcttcgccatccccgcgcgcgagaagatcggacgcgccaagggcgtgcctgccgaccagtataaggacgcctatgcgaacctgctcgttgagatggaagagcagatcgccgcgatcgctgagaaaggagagaaagaagaatgatccgtgaatataagacgatccgcgaaatttccggccccctgatggtcgtggaccatgtgcagggcgtcacgtatgacgagctggcagagatcgtcctctccgacggcagcacgcgccgctgcaaggtgctcgaggtcaacggcgaccgcgcggtcgtgcagctgtttgaagcgtcggcgggcattaacctcgccgattcgcgcatccgctttttgggtcacccgctccagctcgccgtgtcgcgcgacatgcttggccgcgtcttcaacggcatgggccagcccatcgacggcggccccgcgatcatcgccgacgagcatcgcgatatcaacggccttgcgatgaaccccgcggcgcgcaactaccccaacgagttcatccagaccggcatttcaagcatcgatggcctcaatacccttgtccgcggacaaaagctgccgatcttctccggctcgggcctgccgcacgcgcagctggccgcgcagatcgcgcgacaggcgaaggtgctggacggcgagagcaactttgctgttgtctttgccgccatcggcatcacatttgaagaatctgagttcttcgtcaacgaattcaagcgcaccggcgccatcgaccgcacggtgctgttcacgaaccttgccaacgaccccgcggtcgagcgtatcgcgacgccgcgcatggcgctgaccgccgcggaatatctcgcgttcgactgcggcatgcacgtgctcgtcattctgacggatatcacgaactacgccgaggccctgcgtgagatcagtgcggcgaaaaaggaggtccccggccgccgcggctatcccggctacctctacaccgaccttgcgacgatgtacgagcgcgcgggccgtcaggtgggcaaggacggctcgatcacgatgatccccatcctgacgatgcccgaagacgacaagacccaccccatccccgacctgacgggctatatcaccgaggggcagatcatcctttcgcgcgagctgtaccgccgcggtatcaatccgccggtcgacgtgctgccgagcctttcccgactcaaggacaagggcatcggcgcgggcaagacgcgcgaggaccattccggcacgatgaaccagctcttcgcggcctatgccaccggtaaagagaacaaggagctcatgtcgatcctcggcgaggcggcactgagtccgacggatcttctctacgccaagtttgccgacgagtttgaaaagcgctatgtcgcgcagggcacggacgagaaccgctccattgagcagacgctcgacctcggctgggagcttttatcccttctgccgcgcagcgagctcaagcgcatcaaaccggagtatatcgacaagtatctcaaaaaggaagagtaaggggggagaaaagtgcctacgaccactgtcaatcccacccgcatggagctcacgcgcctcaaggggcggctgcgcaccgcccagcgtgggcacaaacttctcaaggataagcgcgacgagttgatgaagcagttcatggaggtcgtgcgcgaggacttagcgctgcggcagaaggtggagcagtcgctcacgaaggcctacggctcgttcaccgtggcgagcgcgctgatgtcgccggaaatgcttgagcaggcgctattgtgccccaagcagagcgtttctcttgaaacgggcacggagaacgtgatgagcgtcgaggtgccgcgctatgagttcaagctcgcgagcgaggacggcgggaatatttatccgtacggcttcgcccagacgagcggcgagctcgacgacgccgtgcgcgagctcggcgacattctgcccgacctgctccgccttgccgaggtcgaaaaggcgacgcagctgctcgccgccgagattgaacgcacaaggcggcgcgtcaacgcgctcgaatacgtcaaaattccgcagatgcagcaaaacatcaagtatatcacgatgaagctcgatgaaaacgagcgtgccaacacgatccgactgatgaaggtcaaggacatcatcctgaaagaggccatcgaagagcgccgcgagaccgataaggccgagggcgcaggcatgatgtgacaaggataaaaaagagggaacctttaaggttccctcttttttggctttttacttttcggccttggtctcgcagtacaggcagcggtaggtgcgcgtttcctcatcggtcagcgtgaagatctgcggcagctcctgctcaacggaggtgatgcagcgcggattcttgcagcgaatgacgtttgtgatgcgctcgggcagcttgagctggcgcttttcggcgagtttgccgtccttaatgatgttgacagtgatgccggggtcgacatagccgatgacgtcccagtcaaggtcgagcacccggtcgatcttgatgatgtccttgcggccgagcttgccgctcgaaacgttcttgagcagcgcgaccgagcagtcaagcttgtcaagaccgaggatgttgtagagctccatcgccttgccggcggagatgtggtcgataacgataccgttggaaatagcgtcgatgatcatttataagtccctcccttattcgataccaagcagcttgaggatcagtgccatgcggatgaagcggccgtttctgacctgcttgaagtagcaggcgcgcgggtcatcgtccacggcaacggaaatttcgtttacgcgcggcagcgggtgcaggatgcagagatccttctttgcattcacgagcttttcgggcgtgaggatgtagctgtccttcaggcgcaggtaatcctcttcgttgaagaagcgctcgcgctgcacgcgagtcatgtagagaatgtcgagctggggcatgacggactcgagatcggtcgtctgctcgtaggggatgttattcttcttgagcgcctcggccttcacgtagctggggagcttgagctcctcgggggagatgagaacgatcttgatgccggtgtagcggctcagggcgctgatgagggagtgaactgtacggccgaacttgaggtcgccgcagaagccgacggtcaggtcgttgaagcggcccttttcacggttgatggtgagcaggtcggtcagcgtctgcgtggggtgattgtggccgccgtcgcccgcgttgatgacgggaacctcagagtgcatggaagcgaccagaggcgcgccttccttcgggtggcgcatggcaatgatgtcggaatagcagctcacggtgcgcaccgtgtcggaaacgctctcgcccttggcggcggaagagctgcttgcggacgagaagcccagcaccttgccaccgagaccgagcatcgcagactcaaagctcaggcgcgtgcgggtagagggctcaaagaagagcgttgcgaggatcttgccgtcgcacttgtgtgcgtaggcctcggggttggcgatgatgtcattggccgtggcgaccatttcgtcgatctcctgggtgctcagctgtaaaatgtcgatcaaatgctccatgttagttctttcctccaatccaagattcgtccgacgggttgttgcggaactgaatgagacgcgcaacatcgttggggtggatataattttgtttcgccgctacgtcggcgatgacgtcaaagttggtcaggctgtggttctttacgttcgcggcggcaaggcggtcaagccccttctgcatgccgtaggtgaagatgctcgcaacgccgagcacctccgcgcccgcttcgcgcaggacgctcacaacgtccagaacgctgccgccggtggagatcagatcttcaatgacgacgaccttctgacccggctcgaggcgaccctcgatctgattctggcggccgtgatccttgccggacgagcgcacatagcccatgggcagccccatcatgtggccgacgatggcagcgtgggcgatgcccgccgtgctcgtgcccatcagtacctccacatcgggatagtcggcgcgaatgatcttgcacagcgcactttccacctgcgtgcgcacctcaggtgcggtcaggatcaggcggttgtcgcagtagacgggactcttgatgccgctggcccaggtgaagggctcgttcggacggaagaataccgcacggatggagagcaatccctccgcaatgctgcgttccaaatgctccatttctatctcttctcctttcaaaatgtcagtctgttgacaaaattagcgtttccaatgcctccggggtttcggcaatctggtcggcgccggcggcggtgagctcttcgcggctgccgtagccgtagagcacgccgatcacgtcgagtcccgcaagatgcgcgccgatgacgtcatgctcgcggtcaccgaccatgacagcgcgggaaagatcgtcgcagccggccgctttaagcgcggctttgacgacatttacctttttgcccgcttccttgtcgccctcgggcgcgccgcagatggcgtcgaagtagggtgcgaggccgaaatgctccagaatgcgctcggccatggtgtcgagcttcgacgtggcgacgaaaagacgcttgccctcactcttgagatgcgcaagcagcgcgggaatgccgggatagggagcgttgtcgagccagccgtcctgctgatagtattcgcggaattttgcgaccgcggcgtcgacattctctgcgctcacgaagcgcgcgaaggtctcgctgagcggcgggccgacgaagaacgacagctcgcgccagtcgcgctcgatgccgaacgcgcgcagggcatactgtccggccttcatgatgccggggccggagtcggtcagcgtgccgtccaaatcaaataagatgatgttgcggcgcattgcttagcccacaaactcgctgacgcagcggcgataggcggcgacgggatcctccgcctgcgtgatggggcggccaacgacgatgtagtccgagccgatctcgcgtgcctttgcgggcgtagtgatgcgcacctgatcgtccgcctttgcatcggcaaagcggatgccgggggtgacggtaaggaagtccttcgtgcaggtctcgtggatgcggccggcttcaagcggggagcagaccacgccgtcgagcccggcgagtcttgcatttttggcgtagtcgatgaccacttcctcaagggggcggtggatgccgatctcttcctccatgctctgctggctggtggaggtgagctgcgtgacggcgatgagcatcggacgcgtgccgtccgcgcgggtgagcccctcaagcgcagcgctcatcatggcgcgcgtacctgcggcgtggaggttgaccatgtccacatcgagggaggagagcacggccatcgcttttttcacggtgttggggatatcgtgcagcttgagatcgaggaagatcttatggccgcgcgccttgatctcgcgcacgatggacgggccttcggcgtagaagagctccatgccgatcttcacaaagggcttttcgccggtgaagcggtcaagaaatgcgagggtcttttccttgctgtcaaaatccagcgcgatgataacgtccttacccatggtgggcacctcctatgatgtcgttcaaatcgtttatgttgtatttctgcatgacgcggggcagatcctcgacgatgcggcggcaggcgaaggggtcgacaaggttggcagcgccgacctcgaccgccgttgcgccggcgagcatcagttcgatgacgtcctcggcgctcatcacgccgccgagaccgacgatgggaatgcgcaccgcttcgtacacctgccagaccatgcgcaccgcaagcgggaagagtgcggggccggacatgccgcccgtgctgttggcaagaagcggctttctcgccctgagatcaaggcgcatgcccatcacggtgttgataaggctgatgccgtccgcgcctgcgtcctcgcaggccttggcaatgtttgcaatgctcgtgacgttgggcgagagcttgacgatgacgggctttttgacggcgtctttgaccgcgcgcgtgaccgacgcggcggctttgggatcggtaccgaagttcatgccgccgccgtggacattggggcacgaaatgttcacctcgagccagccgacctgcgggcaggcgtcgagtttctggcagacctcgacgtattcatcgagcgaaaagccgctgacattcgccatgacgggcttgtggaaaacacgcgcgagcttgggaagctcctcggcgatgaccgcgtctacgccgggattctgaagtcccacggcgttgagcatgccgctctgcatttcagcgatgcgcggctggggattgccgagacgcggctcgcgcgtcgttcccttgaacgagaacgtaccgaggcagttgatgtcgtacagctccgcaaactcgtatccgtaaccaaatgtgccgctcgcgggaatgacggggttgtcgagcggaagagaacagagcgtgacgttcgtttttaccatttgatctcctcccttccgaatacggggccttcacggcagacgcgcttggggccgtttaccgtgtcaatcgtgcagcccatgcacgcgccgaagccgcagcccatgcgtgcttccagactgatctggccgggcttgtccgtttttgcacaaagcgccttgagcatcggcatcggcccgcaggcgcagacggtgtcgaactgctcgggcagcgcgtcggtcacaaagccgcgcgtgccgcagctgccgtccgccgttgcgatgacggtctgcacgccgagcgccttgaattcattttcatagaagacatcctccgccgtgttgaagcccagaacggcgacgggcgttttgcccgcggcaagaagacgtttggcaaggccaaagagcggggcggtgccgatgccgccgcctgaaaggagcgtcgtttcgccgcaggcggcaacgtcaaagccgttgccaagacccgagagcgcatcgagcacctgtcccgacgtgcagcgagagagccagtccgttccgccgccgactactttatataagagggtcacgctgcgctcgtcccagtcgcagatggaaatgggtctgcgcaggaagaaaccgggcaggcgaaggtcgaggaactgacccggcgcggtgatggccgaggtgtcgccctcgagcttcaagcggtagacgccagaggcgatgggggcgttttccgcgatggtgtaagttacttcgatcaaagcatatcctccttccagacgatctcgccgccgatcatcgtcagcttgcacgcaccggtgaggcacgtgccggcgaagggcgttgcgcgtcccatggtcaaaaatgtttcggggtcgacggtataagttccgttgaggtcaaatacggtcaggtcggcgacctgtccgacggcgatctccgtaccgcagccaaagcggcgcatcggagaggtgtgcatcagctcgacgagcttttccagcggcagaatgccttttttcacaagatgcgtgtagcttgcggcaaaggacgtttccagtccgacaacgcccatggcgctcttttcaagacccttggccttttcttcgtggctgtggggtgcgtggtcggtgacgagcatgtcgatcgtgccgtccagaagcccctcgatgagcgcgtcctgatcggcctgatcgcgcagagggggattcatcttgaagcgtccgtcctcctgcagatcgtcctgcgtgaaggcgaggtagtgcggcgctgtttcgcacgtcacattcacgccgcggcgcttggccgcacggatgacctcgacgctttccctggtcgaaacgtggcagacgtggtaggcgcagcccgtttcctcggcaagcttcacgtcgcgcgcgatctggccccactcgctctccgagcagatgccgcggtgcccgtgggcacgggcatacgcaccgtcgtggatgtagccgccgcggagaagagcattgtcctcgcagtgcgcggcaaggatcttgccgaggcgacggcactcagccatcgcctggcgcatcatgctctcggactgcacgccgcgcccgtcgtcggaaaaggcgataacgttttgcgccatgcccgcaaggtctgcgagctgctcgcccttttcgccgaccgtgatcgccccgtagggatgcacatggacgagggcgtccttctcgatgagcgcgcgctggagattcagcgcgtcgacacagtcggggacggggttcaggttcggcatggcggcaacgtgggcaaagccgccgtgcgcggcagccagtgtgccggagcggatggtttccttataagaaaatcccggctcacgaagatgaacatgaacatcaacgaaaccgggaaataaaaccatatttgaaatatcaatagtaatagtatcatcggaacgggaaacaccattgccaatagaaacaattttcccgtccgaaagaaacacatccgccaaatgaaatacgccctgagagaaaacctttgcgttcttcaaaatacagcgcatgttccttcctccttgtcgtgttttcggtgcattatacgggatagtctggcgaatgtcaagagtcaaaatttcgaaaaaaggcgggaatggggaaaaagatgagaaagtatgcacgtttggcatgacaccttgcaggacgcggcgtttcgcagcgggaaaagggcagaaaggggagccttccttggtgtaaaatgctctattccggcaaactgatcgagaaaaaagaccgtgcttttcgacgaaattccgggcggcgcgcggaaatgtaaaattatgcggttgacaatcggtgcagaggctcttatactgagaccaacaaagttccacgaacggagaaacaacacaagatgaagagcattttcgtttttgcatactattattactttactatggattcgtagtaaggctaatttgtgatgcaaagatgcaaaaaggctctgaaaagagattgcttgatgcggcacaggttagacctgtgccgcattttttcgttgtggcgatatttcacggtcaataaggaggaaattattatgatcgtcgtactcaagcgtggcgcagaacaggacaagcgcgagcagcttatcaactggctcaaaaatcagggccttggcgtgcacatctccgagggcgagtaccagaccgtgctgggcctgatcggcgacacggcgcgcgtcgacatggacctgatcgagagtttgagcatcgtcgactccgtcaagcgcgtgacagagcccttcaagtgctgcaaccgcaagttccatcccgacgacatgatcgtgcaggtgggcgacgtcaaggtcggcggcggaaacttctgcatgatcgcgggcccgtgctcggtcgaatccgaagagcagatcgtcgcggtcgccaaggccgtgaaggcctcgggcgcgaacatgctgcgcggcggcgcattcaagccccgcacttctccttatgatttccagggcctcaaggccgagggcatcgagctgctgaaaatcgcccgtcaggagaccggccttcccatcgtcaccgagatcatgggcacgaattacctgccgctctttgaggatgtggacgtcattcaggtcggcgcgcgcaatatgcagaacttcgacctgctgcgcgagctcggcaagctgagaaagcccatcctcttaaagcgcggcctcgccagcacgctcaaggagcttttaatgagcgcggagtacatcatggccggcggcaacgagcaggtcatcctctgcgagcgcggcattcgcacctacgacgactacacgagaaacacactcgaccttgcggctgtgccgatgctcaaggagctcacgcacctgccggtcatcgtcgaccccagccacgcgaccggcattgcgcgccttgtgcgcccgatggcgctggccgcggccgcctgcggcagcgacggcctcatcatcgaggtgcacaacgaccccattcatgcgctgtgcgacggcgcgcaatccctgcgccccgagcagtacgatgacctcgccaaggctgtgcgccgcgtgagagaggcggtggcagaatgacagccggcatcgtcggcctcggcctgatcggcggctcgctcgccaaggcataccacgaggcgggcgagcgtgtgctcgcccacgacatcgaccgcgatgtcttgtcgttcgccgtcatcagcggcgcggtggacgaggcgctgacggacgagacgatggcagagtgcgatgtcatcctgctggccgtccgacccgcggcggcggtcgaatggctcaaaaatcacgcggcaaagatcgacaagcacacggtcgttatcgactgctgcggcaccaagcgcaaggtatgcgcggcgtgcttcccaatcgccgagcagtacggcattacgtaccttggcggtcacccgatggcgggcacgcagttctcgggcttcaagtacgccaaggcgaacctcttcgtgggtgcgccgatggtgctcgtgccgccgcgctttgacgacattgaattactcagccatgtgaaagacctgctctcgcctgcgggctttgggagctactccgtcacaaccgccgagcagcacgacgagatgatcgccttcacctcgcagctggcgcatgtggcgtccaacgcctacatcaagagccccacggcgaaaaagcacaagggcttttccgccggcagctacaaggatatgacgcgcgttgcctggctcgcgccgcacatgtgggcggagctcttcatggaaaacaaggaattcctgctcaaggagatcgactgctacatcgagcacctgagcgaatacaagaccgccatggaacatgacgacgaagagacccttatccgactgctggacgagggcaagaagagaaaggaagaggtggacggctgatgcgaagcatccatatcaaggcctcgcgcgaatacgacgtgctggttgagcgcggacttttggaccgcgcgggcgagcttctccgggaggtcagcgctcccggcatggccgccatcgtgtcggacgacacggtctacgcgctctacggcgagcgcacggtcaaggcccttgaaaaggcgggctaccgtgtgcactctttcacattccccgcgggcgaggggagcaagaacctctcgacctacgcggatgttttacacttcctcggtgagcaccgcttcagccgcagcgacgtggtcgttgcgctcggcggcggcgtggtgggcgacctcgcgggctttgccgcggcgacgtatcagcgcggcatgggctttgcccagatcccaacgacgctgctggccgcggtcgattcgtccgtcggcggcaagaccgccgtcgacctgcccacgggcaagaatcaggcgggcagcttctatcagccctgcatcgtgatctgcgatcccaacacgctcgaaacgctgcccgaggagcagtaccgctgcggctgcgccgagatcatcaagtattcgatgctcggcaatgcgacgttctttgaagaactctacaaaacgcccgtgcgtgagcagtacgagcacgtcatcgaggtctgcgtgcagatgaagcgcgacatcgtcggcgcggacgagtacgacctcggccgccgccgcacgctgaacttgggccacacgtttggtcacgcggtggagcagtgcagcgatttttcccttctgcacggcgaggcggtcgccatcggcatggcgacggtcacgcgcgcggcagtcaagcgcggtatttgcggcgaagagacgctggcgcgcctgctcgacattctgcaccgctatggtctgccgaccgagacgggatatccgctcgacaagctctatgaggcggaactcgtcgacaagaagatttccggcggcaagatgcacctcatcgtgccggaaaagatcggtcaggtgcgcatggagacaatccccgtcgaggcgctgcgcgactggatgcaggatggtggcatccaatgaaaagaaccatcatacccggcgcgcgcacgggccgcgtgcgcatcccggcgtcgaaatcgcaggcgcaccggctgctgatctgcgcggcgctcggcgaagagaagaccgaggtcgtctgcgacggcatttccgccgatatcgcggccacggcgaagtgcctgagcgcgctcggcgcgaaaattgaagaaatggagacgggctttctcgtctctccgatcaaaaaagtgcccgagaggcgctgcgagctctactgcggcgagagcgggtcgacgctgcgcttcctgctgcccatcgtcggcgcgctcggcgcgcaggcggtattccaccgcgaggggcggctgccccagcgcccgctcgccccgctggatagcgttttaaaagagcatggcatgacgctccgcgaggacggcgacctgctgtattgcagtggacagctgatcgggggaaactatacgatcgcaggcaatgtgtcctctcaatatatttcaggccttctcatggcgctgccgctgctgatcagagacagccttcttatggtgtctggcccgctggaatccgcggcttacgtcgccatgacggaggatgcacttcagctttccaagctgaccatccccaaaatgggggcgatgtgggcgattcccggtcagcagagatgtcatctgccgaagcgcacggtcgtcgagggcgactggtcgaacacggcgttcttcctctgcatgggtgcgctgtcgaaagaaggcgtgaccgtcgaggggctgaatttgcagtcctcgcagggcgaccgcggtgtgctggatgttctgcgagcattcggcgcggaggtcattgagcaaggcgatgccgtgacggtcaagcgcggcgcactgcatggcgtgacgatcaacgccgcacccatccccgacctcatccccgtgctgagtgtcgttgcgtcggtcgcagagggggagacgcgagtcgaaaacgcctaccggctgcggctcaaggagtccgaccgcctcaagagcacggcgaatctcctgcgcgcgctcggcggacaagtcgaagagaaagaagacggccttgtcatcacgggcgttcccgcgctgcacggcgggagcgtcgaaacgcagaacgaccatcgccttgcgatgtccgccgccacggcggcctgcgccgcgacgggcgagatcaccgtcgacaacgacggctgcgtggcaaagtcctacccccgcttctgggaggactttggcagcttgaaaggagagggcttatgagcagcacctacggcgaaaatctgcatctgaccatcttcggccagtcgcattcccccgccatcggcgtgacggtcgagggcattcccgcgggcgagaaagttgatctggacgagctccagcgctttctgaatcgccgcgcgccgggcaaaaatgcctggtcgacgccgcgcaaagaggctgacgcgccggagatcctctccggccttgtgaacggctatacctgcggcgcgccgctcacggccatcatccgcaatacgaacacccgctcgcaggattacgcgaatcttgccgtcacgccgcgccccggccacgcggactacaccgccgaggtcaaatacggcggttatcaggaccgcgcgggcggcggacacttctccggtcgcttgaccgcgccgctgtgtatcgcgggcggcatctgcttacagattttagcgcgcgagggcatcacgcttgtgagccgcatcgcctccattgcgggcatttctgacgaaggagagctgacaggctcgcttgcaggcaaggagttccccgtcgtcagcgatgcgcgcggcgaggagatgcgcgcagccatcgcggcggcgcgcgaagagggcgacagcgtcggcggcgtcatcgaatgcgcggttttcggcgcgcccgcgggccttggcgacccgatgttcggcggcatggaaaatcgcatcgctgcggctgttttcggcattccggcggtcaagggagttgagtttggcgcgggctttggcgtatcgaagctgcgcggcagcgaggataacgacgcgttcacggtcaaaaacggcaagatcatcactgagacgaaccattgcggcggcattctcggcggcatcacgaacggcatgcccatcgtgttccgcgcggcgttcaagccgacgccgtccatcgcgcgcgagcagcagagcgtcaatttgcagacgatgacgccggagaagatggccgtcacgggccgccacgacccgtgcatcgtgccgcgcgccgtgccctgtgtggaggcggcggccgccatcgcggtctatgatgcgtatctatcgcgcaaaaaggaaatgaggtaagggaacatggacttaaacgactatcgaaaagagatcgacagcatcgacgatcagcttatcgcgctctttgcccggcgcatggagaccgctgaaaagatcgcggaatataaaaaggccaacggcctgcgcgtgctcgatgcgcgccgcgagaaggagaaaatgcgcgagattctggacaaaacgccggacgatctgcgcgaatatgtctcgtcgctctattccctcattttcgagctgagccgcagccgccagagctgtcttctcggcacgaagggtgatctgcccgcgaaaattgccgaggccatcgaaaagacgccgcagctctttcccgaggacgccgccgtcgcctgtcagggcgtggagggcgcgtattccgagcaggcgtgcgagcggctgttcaagcgcccgagcacgttctttttcagttccttcgaggcggtgttctccgccattgaaaagggcctctgcagctacggcgtgctgccgctggaaaacagcacggcgggcagcgtgaacgcagtctacgacttgatgacgcagcacaacttccgcatcgtgcgctcggtgcgcatcaaggttgaccataatcttctcgccaatcccggtgcgaagctcgaaaacatccgtgagatctactcacatgaacaggccatcagccagtgcgcacactttttacaggggcttcccaatgtgaaggtcatccgctgcgaaaataccgcggtggcggcgcgcatggtggccgagtccggccgcgacgatgtggcggcgctgtcgtcccgcgcatgcagagagctctacggccttgactgcctcgccgcctctgtgcaggatcagggcaataacttcacgcgcttcatctgcattgcgaaaaacctcgaaatttaccccggtgcagaccgcacgagcctgatgatggtgctgccgcaccaccccggttcgctctacaaggtgctctcgcgtttcaacgcgctcggtgtcaacatgaacaagctcgagagccgcccgatgccggaccgcaacttcgagttcatgttctatttcgaccttgagacttcggtctacgccccgcagttcacccagctcatgggcgagctgcccgagctgtgcgaggagttcacgtatcttggctcttacagtgaggtggtttgaatgaagcgctgcggattactcggtgaaaagctcggccacagctattcgcccgctatccacgcggagctggcggactatgaataccggctctatgaggtcgcgcccgaaaagctcggagaatttctgacgggcggcggctttgacggcatgaacgtcaccattccctataaaaaggccgtcatcccgtactgcgcagagctttcacccattgcgcaaaagctccagagtgtgaatgtgctcgtgcgccgcgaggacggcacgctgtacggcgacaacgccgacgcctacggttttgccggtatggtcagggcgagcggcattgccattgagagcaaaaagacgctcgtgctcggctccggcggcgcctcctcgacggtctgtgccgtgctcgaggagatgggcgcgcgcagcgtgaccatcatctcccgcaagggcgaggacaattacaacaatctggaccgccacgcagatgcggaggtcatcgtgaacaccacgcccgtcggcatgtacccgaactgcggcgtgtcgcccgtcgacctgtcgctcttcccgaagctcgagggtgtgctcgatatcgtctacaaccccgcgcgtacagcgtttgtcttgcaggcggaaaagctcggcattccttatatgagcgggctctacatgctcgtcgcgcaggctaagcgcacggcggaggtctttgaaaacaggaagatccccgacagcgagaccgagcgcatctggaaaaagctgagctttgagatgcagaacatcgtgctgatcggtatgcccggcagcggcaagagcaccgtggccgcgtgccttgccgagaagctcgaccgcatcgcgctcgacagcgacgccgaggtcgaggagaaaaacggcgcgacctgcgcccggctcatcgaaaagtacggcgaggcggaattccgaaagctcgagagcgaggccattgccgcgctcggcaagcgctcgggagcggtcatcgctacgggcggcggctgcgtgacgagagaggaaaactacgatcttctgcaccagaacggcatcattttctggttgaagcgtgatatcgaccagctgccgcgcgaggggaggcctctttcggcgggtgaccttgcggcgatgtacgacaggcgcaaggcctgctatgaaagatttgccgaccacatcgtcgacaacaacggcacagtggaggataccgtgcaggcaattttggattgcctgaaataaaggacaaaactgcccgccgcaattttgcggcgggcagtttttgcgcgatggcggcagctacggcaggggatggcgagatcgctgcgcgagcgcttcgtcatagcatctcgcgcagcgccgccagtcgatcacgcggacgcgcagggcgagggactcctcgctgcacggcaccaccggcgcggtcaggtcgagcagcaccgcgccgaacgagatgtcggggtccttcgtgccggtgagccggagtgagccgtccgccatcagcgagagcaggacgcgaccgccgcagccgcggcgcagcgcatgtgtgagcacgcgctcaaagtcctcccgctcgccgaaatcgcgcaaaatcgcggcctcaaatgtattcaaaacagaccacctcgccacaaggtatgcaaaaagtccatcagacagcacaaaaaagcggaaagtcctgtgactttccgcttttcatttcaatttggactaacttagatgtggacgaccttcagctcgctcgcctcgaagagaccgaggcgcttgccgacgttgacatatacctgcgggtcgccgctcgtgcagatgacgaatttgccctttttctgcgggttgagcgcgttctgctcggtgaggtatgccttgacggcgtttgcctgttcgagcgcggggttgatgaggtgcatttcgggatagcactcgtggaagttctcttccacgatgggatagtgcgtgcagccgaggatcaggttttcgaccttttcgcgcgcgagaatgttgtcgacctgcgtacggatctcggtgttaatgtcgtgctggttgaagtcgccgcggtcgacgagcgccgcgagcaggggagagcccttaccgacgaccttgcactcgggatcaccctcatggatgagctcggcgtacttgccggaggcaacagtgaactccgtcgcgatgaggccgacgctcttgagatgctcgcgcaggacgtatttggcagcttcctccacgatgctgacgatcttgtagtcgaagcaggggcgcaggcggtcggccatggtggagatggtgttgcaggcgatggcagtgcacttgacaccgttgtcgccgaggaactggagcatgtggctgctcagctcgaagatctggtcagaggtcttgttgccgtaggggcagttggcactgtcgccaaaatagatgatatcttcgccggggagaatgcgctgtaattcgcgcacgacggtgagaccgccgatgccgctgtccatcacgccgatggggttgcctgcgttcaacatggttgaaagcctcctttttttgtctataaatattgtaccacgcgcacacaaaaatgcaagggataaatcatttttgctgtttgtaacaaatcttgggaaaaggattgcaattttgccctcacctgataaaatagtatctggtgagagttgggtattttacagcccgaaacctgcgccgcgcggcggcataatacagaagaagaggtttgaaacgcttatgacgattttcaacttgatcaccctctttggcggtctggcgctgttcctgtacggcatgcgcctgatgggcgacggactgaaaaaaggttcgtccgatgccttcaagcgcgcgatggaaaaggtgacgaacaatccgctcgtcggctttctgctgggccttgtggtcacagcggtcatccagagctctacggcgacgatcgtgctgacgtcgggccttgtcggcgcgggcgtgatgtcgctgcaccagtcgatcggcgtcattctgggcgcgaatgtcggtacgacgatcacgggccagatcattcgccttctcgacgtaaacgcatcggagacatcgctgctcaatttcttcaagccctcgacgctcgcgccccttgcggcgatcatcggcatcctctttctaatggcggtcaagacccgccagtccgataccatcggctcgatcgcgatgggcttcggcatcctcttcaccggccttctcagcatgaccgcggcggtgagcccgctgtcggaatccgagacgtttgccaacatgttctaccagctctccggtaagccggtgctcggcttcctgctcggcgcgggcgttgcgttcctgctgcagagttcgtcggcgaccatcggtattttacaggccattgctacgaccggcgcgctgacgttctcgtccgtttacgccatcatcatcggcgtcaacatcggcgactgtgtgacgacggccatcgtctgctccatcggctcgaaggccgatgccaagcgcacgggcgtgatccatatcctcttcaacatcgccggttcgatcctcgtgatcgtggggctgatgctgctgcactcgttcggtgtgctcgatgccctgtgggacgaggcgctttcctccggcggcatcgcgaatgtgcacacggtgttccgtcttgcttcggccatcgtgctgctgccggtgtgcggccagtttgaaaagctctcgcgcaagctcgtcaaggacgatgtgcgccttggtgaaaatgtcgaccacgagctttcgctgctcgatgaaaagttcttcacctctcccgccatcgcgctctcgggcgcgggtgaggccatcaccaccatggcgcgccttgcgcgcacaggcgtgatgagcgcgatgggcgtgctcgagcagtacgacgcccacacgatcgaggtcatcaacgagaacgaggagcacatcgacaagctcgccgaccatgtggacaactacctcatccgcctgtcgccgcacatgccgagcggacacggaagcgacatgctcaactactatatccagtgcttcggcgagtttgaacgtatcggcgaccacgccgtgaacctgacggaaaatgcgcaggagttccttgaccgcagcgcgagcctgtcgcccacggcacatcaggagctcatggtgctgcgcgaggtgctcggcgagattttagattacacctacaaggcatttgccgccacggactacgaggccgcgcgccacatcgagccggtcgaggaggtcgtggacgaccttgtcgccacgctgcgcgccaatcacatccgccgcgtgcgcgacgggcagtgcacagtgtacgcgggcctcacgtttctcgatatcctcgtcaatgtggagcgcatcgccgaccagtgctcgaatgtcggcgtctttacgctctcgatgttcgatgagcacatcatgaacaaccaccacgactatattcaggcgctgcaccagggcaaagacccggtcttcaaccgcgcctatcaggaggcgcacgacaagtatttcggcgagctcaaacgcatcgaacgcagcaagtgaactgggccggatctctgcgtgcccctgttttatggaaaataacgatcaaagcgacttttacgcgccgcggcttgcgtttgccgcggcgctttgctataatgcagtgcataatagcagcgcgattctctgcaaaggagcatgaaaatatgaaagcgattcttgatgaaatgctcgcggccctttcgcgcggcgagcgtgtggtgctgagcagcattctggcatcctcgggctctgtgccgcgcggcgcgggcgcgaagatgaccgtctttgaagatggccgcgtgctcggcacgatcggcggcggcgcggtggagcggctgagcatccagcgcgcgcaggacgcgctcaaaaatggcggcagcaacgagctcaagtcctacaacctgcacccgagtgaggtggccagcacgggcatgatctgcggcggcgcggtgacggtctacttccagttcttcgcgcccgagcaggcggcggatatcgcggtgctcaagcgctggcgcgaaatgctcgacaaggatgtcgacctatggctgctgctgtctctcgacggcgacggcgtgaacgagttccatgttgtcacgcgcgaggagatcccgcaggacaaggcggactatttttctgccaaggccgtgtggaagaacggcatttatgtcgagccgctgtgccacgcgggcagcgtgtatatcttcggcggcggccatgtgggccgcgcgctcgtgccggtgctggcgacggtgggcttccgcgtggtgatgtacgacaaccgcgaggagcttgcgaagaaagaaaactatcccatggcgagcgaggtcatctgcggcagcttttccgacatttccggcaaggtggcgctcacggcgaacgactatgccgtcgtgatgacgccgggccatcaggcagactatgagatcctctcccaggtgcttaagagcagcgcgacctatatcggctgcatcggcagccgcacgaaggtcgccaagacgcgcgagcgcctcaagggtgacggctataccgaagaggacatcgcgcgcgtccacgcgcccatcggccttccgattctggctgagacgccggaggagatcgccatcagcatcgcggcggagatgatcgagcaccgcgcgcgcctcgccggacagcggcactgagggcgctcacatgcagattgcaccgcttttgcacgtcggccgcggcgtgacggttatcatcggcggcggcggaaagacgacgctgatagaaacgctcgccggggagctttcgaaaaatggaaaggtcattaccacgaccacaacgcacatctgccgtccgaagcagtatgaaacgctgctggatgcggacgaggccgccgtttcggcggcattggagcggtcgggcatcgtctgtgttgcctcgcaggcggagagcggcaagctctgcgcgccgtggctctcaatgggcacgctggcgcagcttgcggattttgtgcttgtcgaggcggacggtgccaagcacctgccgctcaaggcgcacgcttcccatgagccggtgatcccggaggaggcgcagcgtgtcatcatggtcatcggcatcgacggcgtcggcaaaaccatccgcgagacctgccaccgcagcgcgctctacgcgcagctcgcgggcgtggatgaggagacagtcgtcacgccgcagctcgccgcgcgcgttgtcaacgccgagggttacggcgaccgcgtttatatcaacaaggtcgaatctgccgccgattatgaagcggcgcaggccatggcaaatgaattttcctgcccggtcatcgcgggcagtctgcatcagggggtatatgtatgcttgcattgattcgcggcgcaggagacatcgcgagcggcgcggccatgagattgtggcgctgcgggatcgacgtggtgatgaccgacctcgcccgcccgacggccatccgccgcacggtggcgttttccaatgccatcgtccacggagagacaacggtcgagggcctgcgcgctgtgcgcgcggagaatgccgcggaggcgaagaagctgctgcgcgagggttcgctgcctgttttggccgaccctgagtgcgcctgccgcgaggagctcgcgcccgacgcgctcgtggacgcgattcttgccaagcgtaatctcggcacgaagatcgacgacgcgccgatcgtcgtgggcgtcggccccggcttcacggctggggaggactgccacgcggtcgtcgagacgatgcgcggccacacgctcgggcgcgtcatctactccggcagcgcgctgccgaacacgaacattcccggcctcatcggcggctttgcgggcgagcgtgtgctgcgcgcgccgtgcgacggcatttttactgccgtccaccgcatcggcgacacggtcgaggagggcgagaccatcggctttgtcgagggtcagccgatgaagtgcaccatcagcggtgtgctgcgcggcgtgctggacgacggtgtgcccgttaagaaagggatgaagtccggcgatgtcgacccgcgctgcaagccggaatactgcacgatgatctcggacaaggccctcgccgtcggcgggggagtggtcgaagcggtgctgtatttgagcgcgaaacaacagggcagacgttgatatgccctgcactgcgcgggagatgtcccattggcatgggactgcgcggggcaaagggggccttctctcacgtgagagaaggccccctttgaatcccccaagagaacggcaggggcgtttcgatctcgcccctgcacccctaacgaccaaaagggaggggccttgcccccaatgctgttcggataaggccaaaattgagaaattagtcaaaaagggcaccacctaatttgagattggtggtgcctttttctgaaatattcagttatgcttcaacatagccccagcataaagctacattactgcgattcatttattccatcatggtgtcctgaactgtacccgaaattgtaaccatcgtcatagccttcgttataaccctcttcatgtccctcttcatgtcccttttcgtaccccttactataaccatagtcatatccttcctcatacgcctcagttcgagttttttctatcgtttcctgtgtacaactcagaagaaactcaattcgctcgctctcatcaagaatatcccaatccttctcatcatgagtgagtagaaagtataagttgtctctaaggaataattccaactgcccatcgccacgatatattgggtgtaacaggatatcaccacaggaaagttcactgtgcgaaatagagccatgcaataccagataaagcacagaatgtttagataagctttctatccgccgttggcggtcagcaattctacgcagcgatgcagcttgaacagttttctgatctgatagttcttttgagtcgcattgactaattgtatcgattattttttgattaagacttgaaatcttagattctaaccgtttgttattggcatccacttgcgattgatattctttggaggcaattcttagcgcctctgcatgtcgctgtttccccttgctactggtaaaaaaacaatctctgttttttttgcctatctttacatattgagcttctaactcccttgctgtttccgatgcttcgtccttaaagcgttgtatcgtatcagaatagttctctaatagatttctaaccttttcgacccttttctgagaagtttcgttgatataattatacccttctttatccagcaaaagtggctgaaatcgatatgattcaattcgctttaattgctttttacattcatccaaatttaactcattcatatcggtcaccccttctgtcattttgtatctgaacaagtaaaagtgtaagtgtgcagataaatgctcacctttctgagaaatcgatttgaagaggatacataaacaccgctcaatcggaatgtgtatccgtattcagttacaggtaaaaaatttaatcgcctgagatacaacagatttccaagcacaggaagttgtgcgtggaaatctgttgttttggattgcattggtgtcaatcatttcgcttaatgttgcgttttttccctattcactttttcataacaccgctgctccatttccgccaacttgccaagagtatcatctatgtctttcactgcttgtttttccatctgcgctttcagctcaggattcttttctcgcattgaagggataatctttcctaaaattaatataccagatagaatcgctggagcaatttcttttatcatatctgctaacggattactttcgttgttcataaaggtctccctcttcgctattctgaaggaaaattagtatccgtatgttgcaccgcagcttctacattttccgtcaaagacagtatacttaccacaatttgagcactttgtaccccgaccgcctttgcctgcaccagctacagttgtcattttgtaaccgcatttcgaacattctctaccggttttggtttcgaaaaatgtcattttcccacactcggggcaaatcttacctgccataaaagtccctccaaattaatcaatcttagatttctggttcctgataacaattttcaccatattcgaaaagcattgcttgctgttcatctgaatccattgcatcgtatttgtcaggtgtaatgctctctcataaaagccacatgtcaaatgtttctgtcatggatactccttcttttgaaaaaggtgaagtcatcatgtatgtgtgtatatatgtatatatcacaagaatcaataactgtcaaggaattatatatatctgactgtctttcgtgaaggtaagagttatccattaaaatcgtctttatcccaaatattacaggccaaaacttttactggattatatcacagtcatccaataattcggtacattttttcttcatactcgttttctgagttttgccatttccactcttcattcaggacaacataaaactcgttctcgaaagtccggaaacacgggcggaaatcaggggaaaaactgttattcttaaaatcattgtactattggtacattttttctcgagaaaaaatgcaccagcgaagaaagaatataccaaatttaacacccccaaatggtactattacggattgcctcatttcgggcgaatttttgatacttctccatagcaagttgatacgctaaaaatgacggcggtgggatagtacttttgccattccgccgcaattttgagaaacttttattgcttcgcaatgcttagttaatatttccttactgtcagttttctctaaaaaacggctggttttttgatgcgttttccaactatgttgagattttatgccacacggtagttgaacgggacaaacgaagtcgagtgtaaatttcgtgcattggctctgtccggctttatctgcaccaaatactgtgacatatccgctatgagttgttccccacttgcgccgggggttgccaaaaaccgcttcactagataagtcgccatcttggtgttgattttgtactcataagcgttatccggcttctgttcaaggacaatgccgttgatgattttccagacagcggcggaagtgatgaagtgcccgtaaatctcctgtcgggaatagtcctctttcttgcatttcatacggctggctccgcaatcgtacttgatatggcggaagaagatttcctcccgccaacggagcctgtaaagttccatgatttctgcggcgctgaactcgtcgcgtgaaagcgaggtcaagagggtttccagatctccgttaggcagtctgccgcgcaccactctcagccgcatgatatagggtagtgggtgagcaaagcgggagacataggtgcgtgggctgttgaccttgccccgcttgctgcccgtattcacataaatgtgtcccttttccttgctcgcttgcgactggctatccgtcagaataaactcaatatcgacatccagttcttccattggcaaagcttgtatgggctttaacgcgccattattctgctttgtgcgaataacgaagtccagccccttttgctgaaaatctgcaattaagggataggaagagtaaagtctgtcgcatacgaaaatgcaaggcggaaaatcgttccacgccaccataaaggccgcatctgcgtgttcgttctgcttgctgatagggtgcagtaccatgtccaccgtctgattagaaagcaagtctaccatgaccgtggctttatactggttatacccgcccttggctgtgtttgacgcaggcatgaaagacggcgtgcccttgttgagtgctgtgttgaaatttacgccgtctatgccaatcagcttgcggcccttgtaaagaaaggcatcattcccgttgtctgtgtcagagaagcggcgcagaacatagtataacagttcggaaggaatggcggcgcggcgctcagagaagctggacgcagacacttttaggctggggtaatcgtacagttccttgcgtaaactgttgccgcccatgaggcagagcagctttatcatggtcacttggtcgagtttgcgatttcgggaaaacagattggcaggctcgtcagcatcacgctgccagtctttgattgcggaacggatagcatcttcaaattccatcttaactttatcagcgatattcataatcttttgctcctgtcatgtatttgccgggattggacgcaaaagaagcgcatgacaacagctcccaccggcagggaagccattgtcatgcgctcctaagacactcatccatatgtcaggacagcagcatgaattgtaaaatgggtcggcaataagccaaaatcgtaaaatctcgtaaaactctcaaactgggctactaaggccaaatacaggttagcataagcaaatagtgctgtcaaaggaaagaacagaatgttcactaaaagttcactaaccgaacaccccgtgagggtaaaaatagcgacaagagcgcaaaccgaacagtttgcgctcttgtccgaacagcattggccttgcccctcctttttggattatccaccccgctgttgcttctgacggcgcggcattgctgcgctcgccgcttaggggtactgcttttttagctttttgctgggtcggcactgctgtagtcattgctgatgggctcatcggaaatgatgtcgtgtgaaatgacttggtcttctgcgtccaacagggcttttttcaggacttcacgggcaagaatgcctttaccttcgtcgtaaaggtcgatggcttcgctcatactgcgtaccatcaagtggtatagcgttttataagtcgtcatcttatcacctctacacaattataggtcaatatcaccctattatcaataggtcaatttgccataattttgttggggtgattagatgactcgtatgaaagaactgcgcaaaaagaaaggcttctcacaggttagaatgcagatgctgacgggaattgaccagagcgattattcaaaaatcgagaccggcaaacgaaatatgagctttgaacagtgccgccgcatagcccttgccttggaaaccagcatggactatctcgccggcttgaccgaccaggacaccccctatcccagaacaaagtaaaacgaccgctgacgcggtcgttttttctattagaagcgcggcgagcgcagcaatgtcgcttcggcacgcactgctgaaacggaattatccaaagtagacgtagttcttaccggaagtgccatggggaggataatccaaaaaggaggggcgaggcccctcccttttggtcgttagggggtgcagggggcgaaatcgaaacgccccctgcctttctcttgggggttccaaagggggaggttctcttttgaaagagaacctccccctttgccccgtgcagcgccgctggcgctgccatccttattgatgtttataaatccgccgattgtcgagcgcgaagacacgctggctgaattcgcccactttgagcggcgcgagcacctcgcggtagatctccatgcggctgtcaatctggtcgacgagcgacaaaagctctgcctccgcgcactggggcagcaccgccgcaccgaattccggttggccgtggtgcgagagaatcaggtgctccaaaagcgtcgccttttcctcgggcaggtcgagctcggcggcgatcgccgcgacctcctgcgcgcccatgacgaggtgaccgagcagctggcccttcgtcgagtaatccgtcacaaggccaagctcggagaacgtgaactcctgctccttggcgaagtcgtgcagcagcgtgccggtgagcagcaggctgcggttcacggtgtctgcgtactgcgcggacagaaaatcggcaaggcgcagcatgttgagcgtgtgcatcagaaggccggacaaaaagccgtggtgcacgctcttggcggcgggaatggtgcggaacgctgcctcgtggcggcgcagcatttcctcgcacacggcacggtagtctgcgtcctcgatggtcgaaacgagcgccttgacctcgtcataacccgcctcgcggtcgatgggcgcgacgctcacgagctttgagacgtcgacgcggtcattgtcctcggcgaggcgcagcttgtcgactgtgagctggggcatgccgcggtagtccgatacgctcccacgcaccttgagcaccttgcctacgtcgcgctcgccgatggggccgctgtagtcccagacctttgcttcgatcgtgccgctcgtgtcggcgagcactgcgctcaaaaacggcttgccgctggctgtcaccttggcaaaggcggccttgagcagataaaagccttccacgtccatgccgcgctgcatctgtgcaatggaaagaccggtttccatgatataaacctcatttctgcccgcctcgacgggcgtttctttcataacaggaaacattatagcacgatgcggcggggagcgcacgaaaaaattatgttactttttctcctgccgggcgcgttcgagccagtcctttccctcggtgaagcgcgcgacgaggaacgtgaccacgtagtcgcctgcggcgttgatcatcgtcgcgggtgggtcgacaaggttgccgatcgtcacggcgatggggtaggcgatggccatctgcgtagggaagaagagcgtacagatgatgtactcgccgatgtagccgccgccggggatgccgctcatcgcgaccgagctgaacacggcgacaagcagaattttgacgatgaggcccgcgccttcaaacgggatgccgaacacgccgaagaggaacgcgatcttcagcacgcagctgaagcacgagccgtccatgtgcatcgtcgcgcccagcggcaggacgaggtcggagatgtcacgcggcacgccgctgtcttccgcggcctctaaatttgtcgggatcgtcgcgacggacgagcaggtgccgagcgccgtgaccgcggggcgcaggatgtgccgccgcatgacgcgcacgccctcctttccgccgccgagataggcgtagagcggaaacgcgacgagcgcgtagacaaagcagagcggatagtagacgagcatcgcgcggccataggccgcggtgatctgtgcaccgtaggtcgcgacgagtgaggcgaaaaaaccgaaaaacgcgacgggcgcgtagtaggagatgagcgagacgaccttcaaaaggcagttcgtcatgtcctgcaggacttttgccgtcaggcagtccgcgccgccgctcagattgatgccaaagccgatgagaagcgaaaacacgatgagcggcagcatcgcgcggcgggacagcagcgccgcgaaatcctcgaccgtgaagaagttgacgagcagctgtgcgacgctcgcctgttcatcgaccgcgcccgccgccgcgtccgcccacggctcgaggaccgggggatagaggcgcatcgcaaagagcatgatgactgcggcgataaggcccgtgacgatgaagaccaaaagcgtcgtgcccatgatcctccccgcgcgcttcgggcttttcatgcaggcgatggagctactcagcgagcagaacacgagcggcacgacgatgcagaacatcaggttaatgaagatcgtgccgagcggggcgagacacgtcgcccccggccacagcgcgcccagcacgcatccgagtacgatggcgagcagcatcgcgctcagaaagccgtaggtgcggaaaaaggaacgagacatagaattcctcccttaaaaattgcgttcaacacaatatagcgggaggacttggacgatatgcgaactcaaaaaaggacacatccgtacggatgtgtccttttttgagttattcaagctcgaatgcgccggtgtagagttggtaataggttcctttttccgcaatcagcttttcgtggctgccgcgttcgatgatgcggccgtggtcgaggaccatgatgacatcggaattcttgacggtggacaggcggtgcgcgatgacgaacaccgtgcggccctccatcagcttatccataccgcgctggacgatggcctcggtgcgtgtgtcgatggacgaggtcgcctcgtcgaggatcatgaccggcgggtcggcgaccgccgcgcgggcgatggagatgagctggcgctgaccctgcgagaggtttgcgccgttgttggcgagctccgtcgcgtagccctgcggaaggcgcgtaatgaaatcgtccgcgccggcgagctttgccgcggcgatgcactcttcatccgtcgcgttaagtttaccataacggatgttatccatcaccgtgccggtgaagaggttgacgtcctgcaggacgatgccgagcgagcagcgcaggtcggcctttttgatcttgctgatgtcgatgccgtcgtagagaatctgaccgtcggcaatgtcgtaaaagcggttgatgaggttcgtgatggtcgtcttgcccgcgccggtcgcgccgacaaaggcgaccttctgaccgggctccgcgtagacggagacgtcgtgcaggacctctttgttcggctcgtagccgaagtccacgtcgatgaggcgcacgtcgccgcgcagctcgcggtaagaggccttaccgttgtcgttcgggttcttccatgcccagtggccggtgtggtcggcgctctcggtgatcgtgccgtcaggggcaatgtcggcgttgacgagcgtgacaaagccgtcatctgtctcagccttttcatcgatgagggagaagacgcgctgcgcgcctgcgcccgccatgacgatggagttgatctgctgggagagttggttgatgttgcccgtgaactgcttggtcatgttgaggaacgggacgagaatggagatatccagcgccttgccggaaaggctcaggttcggaacgccgataagcagcagcacgccgcccacgagcgccagagccacatagaggaagttgccgatgttgccgatgatggggccgagcacgctggcataggcgtgggcgcggtagctgtcttcaaagagggcgtcgttgatcttgtcgaactcctcgatggagcgctgctcgtggcagaagaccttgacgaccttctgaccggtcatcgtctcctgaatatagccctcggtcctggcgacggcctgctgctggcgcaggaagaatttggcgctgccgccgccgacgcgtttggtgacaacgatcatcagaatcacgccgagcaccgaaatgagcgtcagccagatgctgaaatagagcataatgccgaacacggccagcacaatcgcaccggactggatgaaggcgggaatggcctcggacacgagctggcgcagcgtgtcgatatcgttggtgtagaagctcatgatgtcgccgtgctggtgggtgtcgaagtagcggatgggaaggtcctgcatgccgccgaacatctcctgacggagcttgtcaagaaagccctgcgtcatataggccatgagctgcttgtagaccaggatcgcgatgatcgagagcacatagagcgagatgagcagcgacaggatggggatgagctctgctttggcggagacccagtcgcgcgagacgtaccacttttcgatgacctgaatgacattctgcacgaaaagcgacgggatcgacgtgacgatggccgagaacaggatgcacgcgaacgtgacgggcgcgagcacaggatagtaggaaaagagctttttcaccgtgcgcttaagcatggcgaggttcgccgcgccgtcgtttgggcggcgggaattcttgggatcacgcttcatcctgctcacctccgttcgtctgggattcgtagacctcgcggtaaatttcactcgaagcgaggagctgatcgtgcgtgcccatgtccgcaatatggccgttgtccatcacgagaatgaggtcggcgtcctgcacggacgcgacgcgctgggcgatgatgatcttcgtcgtctcgggaatataggtgcggaagccctcgcggatcagcgcgtcggtgcgcgtgtcgaccgcggaggtcgagtcgtcgaggatcagaatcttcggctttttgagaagcgcccgggcgatgcagagacgctgcttctgtccgccggagacgttcgagccgccctgctcaatataggtgtcatacccgtcggggaaggagcggacgaattcgtccgcctgcgcgagcctgcacgcctcaatcatctcgtcgtcggtggcgttttcgttgccccagcgcaggttatccttgaccgtgccggaaaacagcacattcttttgcagcacgacgctgaccgcgccgcgcagcgcctcaaggtcgtattcgcgcacatctctgccgccgaccttgacgcagccctcgctcacatcgtaaaggcgcggaatgagctgcacgagggtcgacttgctcgagcccgtaccgccgaggatgccgacggtcatgccggagtcgatgtgcagattgatgtcctgcagcgcgaacttcttcgcctgcgcggagtacttgaagctgacattttcaaagtcgatggagccgtccttcacgtccagtgcgggagaggcgggatcagtgagcgcgggctcttcctcaagcacctcgcagatacggacgaaggactcatacgacatcgtcatcatcacgtagatcatcgagatcatcatcagcgacattaagatctgcatgccgtaggtcagcatggccgagagctggccaacgtcgatggtcgtgccgccgttcgtgatgatgatccgcgagccgacaaacagcacgaagatcatgttgaagtatacgcagaactgcatcagcggcgcgttgagcgcgacgacgcgctcggcgaaggtgaagtccttggcgatgtcatgcgaggccgcggcgaacttctgcttttcatatccctcgcgggcaaagcccttgaccacgcgcatcgcgcgcacattttcctcgaccgattcattaagcttgtcgtacttgcggaacaccgcgcggaacgcgggcattgccttgcgcgcaatcagaagaagaccgatcacgagcacggggatgataataaggaacgtcgtcgccagcgcgccgcccatgatataggccatgatgacggcgaagaggaacatcagcggcgcgcgtaccgcgatgcggatgcacatcatgaaggacatctgcacgttgttgatatcggtcgtcatgcgcgtgacgagcgaggcagaggaaaatttgtcgatattttcaaatgcgaagctctgcacgcgggtaaagacatcgtggcggacatttttggcaaagccggcgctcgcgcgcgagccgtaaagcccgccgagcgcgccgcagccgagcgacacgagcgacatcaggatgagcccaaggcccacgtgcacaacgccgctgagctccgcgccgcccttgatttcgttgacgaggttggcggtgaaaaacgggatcagcacttcaatcgcgacctcgccgaccatgcacaagagcgtcaggatcgtgggctttttatactcgcggatgcagcccatgaaacggcggatcatattcattggcaattgcctcctctcttgcgtggcggggggcaggcgggcagcttgccctgcgcgatcagctctaagcgcttttcttcaaacgtgtcgtggatggtgcgaagcgccgtgcagaaggtctcgcgctcttcgccttcgagctggtcgaaaaacgcgcggaactccgccgcatccttctctaaaaagctcgccacatattcgtcggccttctcggtcgcccgcaggcggatgacgcggcggtcgtcggggtcgctcagccgctcggcaaagccgccctcgaccagcttgtcgacgagcttgctcatctgctgcttgggcatgcgggcaaagtttgcaagctctgtcatcgtcatcgtgcggccgctgcggcgcatcgactggatgcagtagtacatgtcaaggctgacgccgtcgttcagcatgcgcttgaacggacgggcaaaccagtagtgccacgcggggatcgtgtcgagcagcagctcctggatctcgttggtctgcatgtggttctcctttcttgaaaatacttagatagtcaacttaaattgactatcactttaaattgacagtgcttaggatacaacaattaaaaacgaattgcaagaggaaaatgcgcaaaaagggcgcaaaaaaacggcagcctttcactgccgctttaggaaaatatgaatgaggaatgccgcgcgataagtctgtaagaggtcggtttggcgccctcagcgataagtttgtaataagagggtggtttggatccctcaggaggtgaaaaggggaacgagacagtgctcgtcttgccatctacggtgctttcgaccgtgaggatctgcgcagccgcgtccagatggctgacggcgcatgcgtccgcgctttcgacgcggatggttttgtcgccgttgcggcaataatgctccgtgaagtgcatttccttgccgcaggtaaagtcggtgtagctgacttccgtacaggcgtccgccgcaaaaacggggacgagcagcgcaagcgaaaggaccagtgacaacaacagggaaaggagccgtttcatggtatcgtcctcctatgctgatttttgatcgctgacgggaatgcttacatcaacagcatggcataaagacaggaaaatggcaagaaaaatttgaattccacaaaaaatccggcactttgacaaaaatgaaggccaaaaatgagccagaatcacgagcaaggcccgcgccggaaaagacggcgcgggccttctgttattgcttgagttttacattgtttctgatcgtgcgctcacttctggggcggttcgtcaggcgttgcagcacagcgctgatctgcccctcggcagcctcgacctcggcatgaaacgcgcgggcggagacgcgcagcgccccgtggccgaggataatgacctgctcggggccgtccgatgttgccacgcgcacgcgccgctcgcggcgcagctcgtaggtcgcacgttcgatgtaggtgtcggcggtctctgcttccttggtgtaaacgactttgatgccgtgtaccgtctgcacgctgccgggattgcccttgaccttgtaggcatcgaacaccacgatgacgcggcatttgcgaaagccctgatagtttgcaagaatgtcgatgagcgcaccgcgcgcagcggcaatgtcctgcgcggcaaggcgttgcagctcgtcccaggcaaaaataatgttgtagccgtcaacgagcagatattccgtgtcctcggagtggatcgtcacgtcatagtgatcggcgagcgaggcgcgcgcgggctttttgctcggttcgaacacgcggcgctcgaccttgccgtatgtgcgctcgaaaatgtcctgcaattccttgtcctcggcatatgcgccgcccgcgccgacgccgcggcgggggagcggggcgggcgcttcttcgacggcctcttcaccaaggcggatgccgctgtcgcagtgaacatgcgcgggaacttcattccacgggaccgtgatgctgccgccgtggtcgcagaagacggaggacgcgggattatccgtgtcgcgctcggcatcgtagccaagggacgcgacgatctcgtcctgattttggcaggcctcatacccgcgcacagcgcaggagagctgtccgcggccgcgggtgtaggccgcggcgtcggcaaagtagtcgcgcagcgtgcgcaccggcgcatagcccgtgagtacggcgttttccccctcgttctgcggcggttcgacggtgccgcccatgttctggaggtcggtcatcgcgcggccgacgcactcggcgggcacctcgagacggaagtcgtaatacggctcgagcagcacattttccgcctgcatcaagccctgccgcacggcacggtacgtcgcttgacggaagtcgccgccctcggtgtgcttcagatgcgcgcggcccgcgacaagtgtgaacttcacatccgtcaacggtgagccggtcagcacgcccgcgtgctcgcgctctaaaagatgggtgaaaatcagccgctgccagttgaggtcgagcgcgtccgtcggcacgtttgacgcaagctgaatgcccgccccgcgcggaagcggctctattagaagctgtacttccgcatagtggcgcaggggctcgaaatgtcccatgccgaggacgggggcggcgatcgtctcgcgatagacgatgctgccctcgccgaaggtcacgtcgaggccgaagcggtcgaggatgcggcggcgcagaatttcgagctgaattttgcccatgagctgcacgtggatctgcccgtagcgctcgtcccagacgatgcgcagcatcgggtcctcttcttcaagctcgcggagctttataagcgcgctgtgcgcgtccgcgccgtcgggtaggatgagctgataggtcaaaaccggctgcaaaagcggggcggacgcctccgcctccgcgccgaggccgagaccaacatagctgtggctgaggcccgtgacggcgacgacgctgcccgcgcccgcctcttcgagcgcgcggaatttgacgccggagtaaagccgcagctgatcggccttttcattgtagtcctgattctgcgcgcgataggtgagagatgccttcacgcgcagcgcgccgcctgtgaccttgagccacgtgagccgcgcgccctgcgcgtcgcgcgagatcttgaagacctttgcgccgaattccttcggatagaccggctcgcgcgtgaagcacgcgagcgcggtgagaaagtcctccacgccgtccagcttgagcgccgaaccgaaaaagcaggggaagaccttgcggtttttgaccatctcagcaatcagaacgtcgtcgatttttccacgctccaaaagctgctcgagcgccgcctcgtcgcagagggcgagcgcttcgtcgcgcgtttcctgcgatgcggagaaatcgacgcattctgcgctcagtgtcgccgcgagctggcgcagaagcgcgtccttgtccgcgcccgccaagtccatcttgttgatgaaaagaaacgtcggcacctcgtagcgcgtgagcaggcgccagagcgttcgcgagtggctctgcacgccgtcgctgccgctgatgacgagcactgcgtagtcgagcaccgacagcgtgcgctccatctcggcggagaaatcgacgtggccaggcgtgtcaagcagcgtgaactccttatcgcccgcaaacagcattgcctgcttggaaaagatcgtgatgccgcgctcgcgctcgagcgcgtcggtgtcgaggaaggcgtcgccgtgatcgacgcggccgagcttccgcagtgcgccggaggcgtataaaagcccctcggacagggtcgtttttcccgagtcgacgtgggcgagaatgccgagcgtggccttctgcatggcgcacctcctttgtgaaaatctgatttacgaaaagtgccggaataccaaaacgagcgcatcgcggagcgatgcgctctgaaatttgtggaatggagtgtgttgacaaaaaagatgcaggagcaaagtcttgtgtcgcaagggtttgcgggcttttgaggctcgattttccgttttgcaattcgaacccccagcatcttgtgatgacggatgaatgatctgtaaatgtgcgcgtgaatctgtaaattaagtatacgtgaaaatacataaaacgtcaattccaatagaccaattttacgagccttttttctgctttttttaccggatgttaatttccccacaagtggctcaacacccgctcaaatccccgtgtgggggtggttaccttggggtgcctgtaaaaagcgcacacggcggctcacaggggcgaacacggtggggaagggtggagctgcccaccgcggggcggatctgttatatgccttgcggtttcgccagccctgaaagcctacgggatacccggcagagctcgcctctttgaggtggtggaacgcgtcaaagaagtcaacgccgaacgccggcgtgaagaatccgccatcgtcatcaaggccacagaccgatactcggagacagtcaagcgcaagggcgagactacgaagagcttcgggaagaaccttggcaaaacggaggacatcctgacgctcctgagcaaaaacaaagcaaccatcagggttgatgtgaagcaggcgaaagcaccttgcaggatgcggaaaagcagtttgcgaaaacccgcagcgaagcggacaagctgaagctggaaacggcccaggcggactatgataacatggtccggaatttgaagtccgtcaccaaggccgccggggatacagagaaggcaatctccaaaatagaggatacggctactgggagtagtaacgcattttcaggtattgtcggtgctatcgcacaaatccgaattactaaactggtgggcgatgcccctctggacgcacgataaaattccgaaggccattggcgcggagcacattcagttccacgatccgcggtatgcctacgccgcactgtccctgaaaaacaggggtggacgtaaaaccgttatttgggggtgccgggccactattcggatggatccacccttcgctcctacacccataccacaccctaaacaaagcagggcactgggcgcgccatcggccagcagatatggtaaaaaccgcagacctggtagcatttgccggatctgcggtttgtcagtgttcagatttgccggtctcgcttttctcaaaaccgttttcagcgcagaacttccacctgctccacaccgtaccgccggaacagctccagcgcttccggaccaattcgctcaccggacaccgtaattgggatcgcaggaggacaccccacggtgggggcgccgcagacccgccccaacgactgcgccgccggtatggtctcccgtggggcaaacagtgcctcccgcacggaacatacccgttctccacgagccaacggcagcgacggctgcggcgcataaacggcgtcgtttgttcctatggcatacacaagccgctcgatatccgccgcactattctccggcgtcagcatcagcaccagaaagtccggatcggcgtattcacattccacgccgctctctcgcaggcggtctgccagcgctccgccggtcatcccggctggagccttgacggtcagccgcagcgggtccgatggctctatctgccaaccggcagccgtcagcgccttttgcgcttcctccagatgcccacacatctcccgcaggtggtcccggtacccatccgccagatagcggttgcacagatccagcgacgccagcgtcaggtaggacggactggtggagccaaacatggccattgctgttttcgcactctcccggagagatgccggagccgcacggccaatgtgcaggtacgcgccgccggtcagcaccggcagcgtcttgtgcgccgaatcacagcacaggtctgcgcccaaatccagtgggtgacaggagggctccagaaaccgcagataggcgccgtgggcgttgtccaccgccagcagcgtaccgtgtttccggcacacctctgccagagcggaaatgtccgccatgccgcccagatagtccgggctggtaagatagaccgccgccggcggcgcaggcagctccgccagcgtccgctccaatgtgtccggcgataccgggcagccgcagagagacgagctgcgctctggccacagccagacgatctcaaaatccagcagggccgccgcatatacaaacgcccggtgtacgtttcgggccgccaccaccgtccgggacccgtttccgcaggtcagcgccagatacagcatcgcccggatgcactggctggacccctctgtggagtacaccgtccggccagagccgaacagctccccggcataggactcactgcgccggatgatgccttccgcttcatacaggctgtccgcgccttggatctcggtgatgtccagcgcctcgcaacccagaaagggttttcccttgtggccgggcatatgcgcccggaccatcccggaatccgcgtaccgccggacaaaatcagcaatgggcgtttccatcagccgttggccttggcagaatcttccgccaccttcatcatgatggcacattcaatacgcttgcggaacaattcgcagcctgcctcgtaaacgccgcggatagagcccgtggcgtggaaggcgttggctgcgcagccgccggagcagtagaatctcgcccagcagtcattgcactctggccgggcataggcgttgcaggagcggaattcctcccgcagggccgtattggtcacgccgttccagatgtcgcccagcttgtaggcttcctcacccacgaactgatggcagggatacaggtctccccaaggggtcacagccatatattccgtgccggagccgcagccggagatccgcttgtaaatgcaggggccacccgtcaggtccagcatgtagtgatagaaggtgatgggcttgccttccttttcccgacgcagcatatccttggccagcagctcgtactggtccttcacgatctccagatcctccgccgtcagtgcggcggggtcctccggcgcgcacaccaccggctccatgctcagctcggtgaagcccagatccgccatgtggaacaggtccttcgtaaagtccggattggcatgggtaaaggtgccgcgcatataatagttcttgttgcccctggcctctaccagcttctggaacttaggcacaatgcgctcatagctgccgttgtctgcatagtccacccgcagccggtcatgaatttccttgcggccatccagcgacagcaccacattgctcatttcccggttggcgaagtcgatcacgtcatcatcgatgagcataccgtttgtggtcagcgtaaagcggaaatttttgccccgctccttttccacactgcgggcatactccaccaactgcttcaccacgtcccagttcatcagcggctcaccgccgaagaagtccacctccagattggtgcggctaccggagtgatccatcaggaagtccagcgcctgcttacccacctcgaagctcatcagtgcgcggtcgccgtgatacttgccctgactggcgaagcagtaggagcagttcaggttgcaggtgtgcgccacatgcaggcacagcgccttcaccacatcgccggaacgctccttgaacgtaccggccatgtctgcgaaggtgtcgggggtatagagcttcccggcctgcttcagcgcctctacgtcatcaatgcagttccgcagatcctgctccgtcacatcctcgcgctcgccgtatttttccatcatcgccgttacgatctcatccgccgtgtgatccgggtaaagcgcaatgatgtcataggctacctcatccactacatgaatggcgccggagcaggtatccagcacgatgttgtagccgttcagttgatactgatgtaccattcttccgttctcctcgtacagaaaaagtgccgcctgaacaggcggcagctttttgaaaattgcgattgattacttgttggtgttctcacacttctggtttgccacgccgcagctggtcttgcaggcagactggcaggaggtctggcactcaccgcagccgccgttcttggcgctgtcgcacaggctacgagtctcgagagtcttgattctttccataatatgtatctccgatctgttaaattctaatggatttcccggcagaccacccgcagacagtcacctaaaaaccggaaaaattttagcatatcatccgtataaagtcaagatattccagcaatttggctattgggcgcatttcataacgataaaagcacagaccatggcttctttggggaagccccgccgcccggtcgccgctctgggcagcgtgaagtccaagctgctgaaaagcttgtcgtaaaacatgacggcgcgggaactggcacgaaccatgatccttgatgtgctgcgcacaacggggatcaccgcgaccgcggggatcggcacaaacctctatctttgcaaggtcgctatgaacatcatggccaaacacgtcgcgccggatgagagcggtgtccggatcgcggagctggatgaaatgagctaccgcagacagctttggatgcaccgcccgctgaccgacttctggcgggtgggaaaaggctatgccaaaaagctcgaggccatcggtatctacaccatgggagatatcgcccggtgctccatcgggaaggccggggaatactataacgaggcgctgctctgtaagctgtttggcatcaacgccgagctgttgatcgaccacgcctggggctgggagccctgccggatctccgacataaaagcctataggccggagacgaactgtgtcagttccgggcaggtccttcaatccccttagcggaaccatgtgcgacggtccttgatccgcagactgtccatttctgctgtggtgtggtaccggccaatgcgtttgacctgatagcccagatgggtcagtagctccggcagatccgttttcctggcgatctgtatttctgtgtctgtaaagcgtcttttgatctcgcttgccatagtgatgacctcctttctggcgaaacgcaaaaagccggtcatggcacccgagctgttcggatgccatgaccggctttcttctaaatcgtgttttgctttgacgtttgtgcgggcttagacaaacgaggcgaaagcaacataagcaccaatgtaacgaaaaaggccgccgttctctcccacatggggagccgaacggcggcctgccttcttattcttcattcttttcttagcctcggtgttcaagtcacaccagtccataagagcactctgctgcatctctaaaatgtcgcctctcgcgtagaaaaactgatttcccgaaaaaagtgtttttcctaacttttccaccagataaaagcctgtaaagatgcaaaaacaccgcactttcgtgcggcgttttctgtgctgcatctttcatcaacacatcttggcccgagtagaattatagggtttcacgaaattagaagtataaaacggttttgggtagtcggcaattggtatttctattgagctttctcggataagcgtatcttctcgactaaatgatttgcccaaacgagaagttgtaaggcgcgttgttcactatcttcccagtcacactcatgagcacgaggatttcgtatgcctgtcatacatccggaaaagatttgcatatatccaatctgttcatcccgttctgaagtgctttctccggcgttaatctttaatatgggagtattcccattaaagaccgctgtcatcagtttggaaccggttagatttgtgtcaccttgttttgctgtttttttgaccaagttatcaataaacttatatgcttcctcaacagcgcgagcatggtggccatctcggtatagtttctctaccgcttttcggagtgccttatctgttaccagttgatcaaaagcatcaactggtagttgcttttctacatcttttcgtggtagtaccccagaagaagcatcaatgtcctcttggagccttttgactttcaaaaaaatagtcttgtccattaagatctaccgtaaagatgtttagccatactggcaaaaatactgtcgatttgatcaggagatgcatcgggcgaaatatgaatttgcaaatcaatgtgtaccgacggggtaggagaagcggcaacagtaggcataatgggagcatttgcatcaacggctggcatagggggtgcagaaacaggattggcaccattatcagccaaaacacttttctgcggcttatttgtcttggcttttttgggggctgtcgtggtctttgtaacatcagcgtctgctttaatttgaccgcttttcagcatagaaaaggtcgaggtaatcttgccagcggcgttgtctcctaaagagcaggtgtccataaaccaagatttcgcagttgcattgtcaacttgcgtatcaggaaaaagatcgagcagctcttgaggatagatttcagcaataatagcggaacatacgtctgggtatttagcatcacttctccagtcagttgcccgcggttgcggttttccgtccgcatcaattatccccatttgtctaagaggagctaaaatgttccgcgcagattgatcagaattcaaactaagcaacgatttcaaataactcacattaacaacagaggggatagttttcttaaactggttgcgaagctgccaccagcttttttcagatatcatcggataaatttgcttgtcagccacatttttcactccttaatcatgattttattacattataactcatgatttgccttttttcaaccagtttttctcatggtagtaatctgagcaatttggtaagaatccttttcaaacttcgggacaaattggcgctgttgacaaagtctcgctccgctccgccctaccaacaaaaaaagacgccctctggcgtcatccggcgtgttttatcatccgtttcaggttcaatgcggtcgccgacaagaggcagtggtcctccgctgcctctaagcctcgtcgcaaaacgcgcgctaagttgtgctcgcgcttctgcgcggaaaacgagccctcgcaccagacctgccgcagtttcagcgcctcccggtattccgggctggaacggcgttccaggttgcgctgtcggtctgccgcaaagtagctggcggacacctttcttgcgccgcatttgtcgctctcgcgcaggcatttttcccgcagcggacagagcgcacagtcccgcttatccgcctgatactcccaaaacaggccgctggcgctgcgggccagccgccttaaacacagctcttttccaatgggacagaggtacacatcacggttctcgtcgcggcaaaaatcgtcccgcgtaaactggacagacacccgcgcggcggtcttttgcggccgcacgaaaaagccgatccccagttcacccagcgcccgatgggccagcggaaaatcgtaggcggcgtccgccgtggcagcctgaattggtacaacattttcgtgaatatgctcgatcaggcccaaaaacggcacggaatcgttcacatctccggcggtcacggtctggcctacgatgatgccgtagtcgctgtccaccgcctgatgggcgaggtaatgaggcccctccggtttccccgggcgcttcagatgacccgactccgggtctgtacggctgacgcgcttgtgggtgcggcggttgtcccgtttgatctgctttgtccgctttttgcggcgctttccggttcgccgctcaagttcctccaacccttcctcctcataatcgtccagccgttcccagtaaacgccggcctcctccgcgacctccaccagttcttccgatgcgcgggaggcgttggccctcacatgggtcgagtctgcccccaccacgcgcccgctgaccagacctttttcgatgcattgccccacgacttcttcaaataaccgccgaaacaccttgcgggaggacggtttccggcggcgcagctgcgagacggtgctgtgatccggtacccggtcgaagaggtcgaggcccaggtaccagcgcagggcgatgtcggtctggacgcgtcgctcgatctgccgctccgacgggatgccgtacaggaaacccaccagcagatacttcacgatgaccaccgggtcgatggccgggcggccgtattttttgctgtaaagcggggctgtttcctcgtaaacgaaggacagatccagcgctgcttccaactttcggaggaagtgctcccggggcatcagatcctcgatcgttaccatgtgcatcgccagctgcatcccatcacctcaggtcgttttcctcattataacataccgcgagggctgttgcgagactttgtcaacagcgccaatttgtcacggtttgaaaatgacggctcatgatggcaagaaacgcctgaccgatgtggccgataccgagcagctcctccgtatcatccagtccatcccgtcaccaaaggcggagccgttcaaactctggctggcgcaagtagggcgggagcacattgaagaaaccatcgacccagagttgaccatcgagcgggcattggaaacctacctcaagaagggctatacccgcgaatggatcaaccagcggctgcaagccatccaagtttgcaaagaattgaccgacgaatgggatgcctgcggtgtgcagaagggcgtggagtacgccatcctcaccgatgagatctccagcgcgtggtcggggatgtccacccgccagtacgaaaacctgaaaggtttgaaaaaagaaaatcttcgtgataacatgaccacgctggaactggtgctgaatatgctggcggaggccaccaccacggaaatttccaagcagaaagcaccggcgaccctttcggagaacatcgacgtggctcgtgccggtggcaaggtggctggcgacgcgcggaaggccattgagacgcagaccggcgttcctgtcatcacttccaagaacgctgcgtagctcagcgaagtggttacaatataaagttgggatttcttgcgaatataagataaaagcaacaatgtcgactcttgcgttgcgacatacacagaagaaagcagcccctgaaatcgaatgatttcaggggctgtgtcgggtgttgacagaaaagatgcgttctagaaaatgcaccactgttcagtctgttgagtcaagtattccacagctgacgatttagcataaaccgaaggattacggctaaaaagaatagattgagtgcatatactgtaaatccaatagatgaaagacactgaataataatttgaaatattctcttcgatacttcagcaggatcagcaggaatcaaaagagtaatactactaatgacaatagttgcaattgcatatgctgaggcatatttaaagtagataacgagttgtcctaactgggtaaattcacttttagcatgggcttgcgttgcagccatcttctttactagattagtattgataaggccgagtatagctgctacatataccgccaaaacaatggaagataaagttagtccttcacttgcaattatattataatcgatgtgagttaaccacgaaatcactatagtaagcgttgcgagtattacagcagctgttttgtcgcttttacgcattcgctccccccaaattgattgactaacagtgttttaacgatgcttggctcatagcgataatcatcgtctttaattacattgatttctacagaagatataagcgttgaaaaattgaaagtgctttcaagtccattgtcatccataccaaccacaatcacatcctcaaattcaccgctctcacgcttcattttccaatctctaagtgcgttcttagctgccccaatgggtgtagcaccataatcgagacgaatcttgcttttttcaggcaaatccaagccatacagatttgcttgctttttgaagatgctatcttccttggaagtgaacagagtccttctttgtgtaaagcaaacagattttaattgcgttacgacattcaagaaatcatcaacggaacgaagtacattctttgtttgtgcagatttttgcaacatttctgaaatgtaatctgtgatggtagcttttttactgtagtcagatacatataggatatggctctccaagtcataacatgagaacagctgaagtctgggttctacttgacttttaggtcgaggattctcttttacagagttgtcctctgtgtcaatgaccttgtctgaatataattttgcgttgtcgtattgaaaatacatccaataaaaacggtcagcaatcaacttctgctcgacactatacaagtaagcacctttaggatatagtccccgtccaacctcttggagttttctaaatatcgaaatatcaggaaattgatcgtcgatataaagcaacaccgcgtgaaatttcatcacagccctcctcaaacaccaagtcctattgttaataacccattcaaagtagatgcgcctatattcaacaggcccgtatgtcaaagataatggcgcgattacccactatccgaatcaattatacagccatttcgataatctgtctatcacatacggcaaataaggaatggaggaatgctgtcattcaacgcagtcttcctccgttcgtatgatttgctcatacaacatcacaaatttcttctccgccacaatgttctcatggtaatgtccgaagagccactattgaactagcagtgctctcggacttcgccgaaaaaatccgtcagagtatcccgctggtacagtccgccaccgaatgcatcctggatgctgctgggtagcagtgggttatgatgtactagtccacatcccaacctgccttgtccatcgttgccattgcggttcggtattcattcttgctggggagttcttctttccatcaggattgacggttgactcagtacaaactgccccgcggcgttgagctgtaggagcttccgttcatagtccgaatcgtcaggccccagaataccgtcccggatgtcgtgactgctggccccacccatggtaaagattttctttccgcagatctcgtaaagctaccctcgcatcaggcacaagactcttgggtggattggctgcaccaggccgcagtggcattcaatcgtaggataagctgcggagcaaatcatagttcttgtgattcctattgacaaacaggcgatgagacgtccagcctctcagccagtccagacaccctatgtgtaccagtggccattattgattggtgatagtacccgtttagaggcatcaatcgtcgacgcactggaggaactctttgccgaagttgtattcttgcttatggtgacctttttacattgctgctaatatcgcacactgcattagcgccgaagtcttgcaagtttcctcgtctcattttctgtggtatcctaatctaacagaggaggatattgctatgaaatattcaaacgatgaaaagctatccatcatcacgcgctatcagcaaggtgaaaatgtcgctacgctttccgatgaactcgatatcccgcgcagtaccttatatcgttggatcaaatcttttcctacagacagtgctggaaagccgttgaagttttcctatcaagaatacacattgctccagcgtaaagttgaaaaattacaaaatgtcatcacgattctgaagtccgccgattgtttggtatctgcgccattaaaggaacggctgtacgcgctggaaccgttttacgggaaatgtgaagttcacacaatatgcgaagcgctagatgttgaccgcggtacattttacaaccatatgttacgcagcaagcgcggcaacgcttggtttgataaacgtcgccaagaatactgccagctcatccgtgatgtgtttgacgaatataggcaggtgctgggtgcagagaaaattcggacgattctcgttcagcgtggataccaagtcagcgcggaatatgtttcgtgactcatgcgtgaaatgggcttaagcagcgttcggatgacggcgaagcaggaatatctaaagctgcgtgaaccggaacgaaagaaaaatatcctgcggcaacaatttaacgctcagcggccaaatcaacgatgggtcagcgatgtcacctgttttaaacttggggatcactacttttatatttgcgtgattatcgaccttttctcacgcaaagtgatcgcacataaggtttcaaaaaagaacagcacccaacttctcacagcaacatttaaaatggcgcatgaagaacgccatcccccatctggtcttatttttcatagcgaccgtggagcgcaatatacctctcaccggtttcaacagcttttgcataaatacaatacgaagcaatccttttctcagcccggcaagccgcatgataacgcggtcgcagaatcattcttcgcatcgttgaaaaaagaagagctctaccggaaagatcatccttccgatagagcatttcaagccagtgtagcttcctatattgagttttacaataccaaacgacctcatcgcacattgaaaaatctgacaccatgccaaatggaagagagctgctgtgcaactgctaaatgagacatccgtgttcgaatcgcctaatttgctcgttttctactatgttttgagacggtttgtattttcgtgtctcatatttgcttcagcgcgccactcgctgaaatccctgtcataccaagactttcaggacataaaatgaccctacccaatcctcaagtctcattgacttgttcgaattgggtagggtcgttcattttggagtgtgttgacaaaaaagatgcaggagcaaagccttgcgccgcaagggtttgcgggcttttgaggctcgatttgccgttttgcaattcgaacccccagcatcttgtgatgacagatgaatgatctgcaaatgtgtgcgtgaatctgtagattaagtatacgtgaaaatacataaaacgtcaattccaatagaccaattttacgagccttttttctgcttttttaccggatgttaatttccccgtaagtggctcaacacccgctcaaatccccgtgtgggggtggttacattggggtgcctgtaaaaagcgcacacggcggctatgttatagggagcgctcagtttgtcggctccatccatgcctgcttttccttcggcgcctgctcgatccagtccagaaggttttggctctcctccagccactttgccatttcaaacatctttgttctggcctgcgtgctgtccatcgtcatgtttgttttctcctgttttttgttttgggcgtagcccgcgtcaacacaatggcttaacgtagtcgggaaagatattcgtgaacccggacaaaaatttatgcctgagcttgtgaaaaactgacttaaataaaaagtggagacacattggccaatcgccagtgtgcctccactcatcatttcagtcggataatctgcttatagagcattacgaactttttctctaccaccatgttttcgtggtagtgtccgaaaaaccagtattggaatcggcatcgctcacggacctcatcgagaaagtctgtcagggcatcccgccggaataggccaccgctgaatgtgtcctgaatgctgctggggcagcagtgggtgatgatgtagtccacatcccagcctgctttgtccagtgcttctcttgcggcccgatattcgtcctcgctgggcagttcctctttccaccaggagcggtgattgactcggtagagagcgcctgcggcgttgagctgccggagcattcgctcgtagttcggatcatctggttccagaatgccgtcccgaatgtcgtgactgctggccccgcccatggtaaagattttctttccgcagatctcgtagagctgccctcgcatcaggtgcagaacgctgggacggatcggctgcaccagcccgccatgccacacacttgtcgggtagctgcggagcagatcatagttttcgtgattcccactgacgaacagggtggtgaatgacctgtcttccagccagtcgagccattgttgttcaatctcactgccatcccagacgccgccaaagtcgccacagatgatgaggtaatcgtctttggtcaggcccccttgctcgcggaatgccgcagggcgtagcctaccaaaatcaccgtgggtgtcaccggtcataaaaattgccatcttttttcgcctttcctttttattgtaatccttgctcgagcaccacatcggagtctctaaattggatgcggatcgtgtcggcgtcctcgaccgtgatcttctgaatgatctgccggatgaactcatcgtcgaactccgtgtagccctcgctgcattcgatcaagctgtcccacatttgctggcgcttggcaacttgttcttccagaccgacttcttcctgctgggcctctaaaatttgttccttgagagacgctttctcatccgtcagggctttcattctggcgttcagatcagcgtcggccatgttggccagcagcgagtccagcagatcagcctgctcatggctgacttcgtcgaggcggcgcttcagcgtcagcagttttgtaccggcctgagtcagcgcctgcttggcttcctccaccatcgccagcacatcggggcaaacctcctgccggatggccgcatactcgttcatggcatcgaggatggcgtggtggagcttgccctcatccaacgtaggtgagacatggcagtattttgtgccaaactccaaccgcgaaacgcaccgccagacgatacgctttttcccatctctggcccaggtcacccgcttgtatggggagccacactcaccgcaaaccagcagctccgtcagggcatatttgccggagtattttccaagctccgtttttccgcttttctgcagcacctttcgcttgctggagcgacgtgtcatttctttccgtaccaggtcgaacgtctctcttgagacgatggcggggtggttgttctcaacgtaatacatgacacgctcaccgcggttttttcgaactttttgagagatgcagtcagtgacataggttttcagcagcagggcatccccgatgtatttttcattagtcagaatgttatggatgatggcaggggaccagcactccacgccctgggccgtgggaatgccgtcctcgtccagctctcgcttgatcttgcctaacgtgcagccgtccagatacctgcgatagatgcggcggacgattgcggcttcctccggcatgatctccggctggccgtcctcgcccttgcggtagcccagcattttcttatattgaaagtggacattgcctgcctttgcgcttttctctttgccccatgcaacatttttgctgagtgactcagactctgcctgggcaaagccgctgaacagggtgaccagaaactcgctggattctgtaagagtattgatattctccttttcaaagtacacgccgatgccattggctttcagaagtcggaccgtatccagacaatccaccgtgtttcgggcaaagcgggagagggacttcgtgatgatgaagtcgatgcggccacgcttgcaggcggtgatcatcttattgaactcggccctctttttgaggcttgtgccggagatgccctcgtcggcgtaaataccggccatctcccaatcagggttgtcctgaatcttctgggtgtagtaggtcttttgggcttcatagctattgagctgttcctcactgtcggtggatacgcggcagtaggccgccacacgcatcttgccaacgtagtttctaagtaattcttccggcttcctggtcggtgggatctcccgcacacgccgttctaaagtggttgttgctgctgcttccatggttatttgtcctttccagtgaagttatcatccgtaaatgtgaggctcaccgtagcgtccgacgcgacggtgatataagagaccacccggcgaaagcggtgccaatccacgtccactgggcggtctgagggttcatattcagaagtgggctgggggcagcagtcatatcgcgcggctgcaccctgtaaaataaggctcattacggcttcgggcgagtcagggcgttcaagtccgcggttgatggcgttgttcagtcggatgacctccgcagagggagcataagcatccggcccttggcatttgtgcgcctgaagctggcgagcaacctcttggatcgtagcatcggcgtccagagtggtggcaatatcacagcattcgcatttgaggtacagcttgctgctgtcctgccagcgaccacccagacgaaccatctttccgttgcaggtgcatcggaagtagggcttcagacgatcaaggggtgttactttcccttgtgcctgatatttgacgcccttttcggagattttctcctgtaccgcctgaaaatcagactcgtcgatcatcactggataaccgtctttgccgatgtagcgggtgttttcgaggacccgctttaccttgtgcttgttccagagcggtgcttcgggggagaatgggatattctgccgattcagtgcatctgaaatgttctggtaggaggcaccggcgttgtagagggtatacaccataagaacgacctgctgttcctcggggacgattgccagggcaccatcatggatctggtatccatataagattttgcgattcgtcatcttgccgttacctccaagtgctctgttagctccagcccgccgtagaggtggaagcggagcatggtttgggactccgcaacgatcttctcgacaaggctttcaaagagatcatcgtcaaaggtatccagttgatccgggccatcgaggacagcctgctggacctttagaagttcgtccatgacttcgtccaacttttcgttttccgccagcctgcggcgctgcccgcggagctgtgccagcctggcgctgattacattcatacgggccgtgcaggcgtcggcgtcgagcagaccattgacacgcagggtactgatcttatggctttcttccgtcgcttccgcaatggcgcggttgatcgtcagaatcttcggattattttgccgcaggatggagtcaagggtgttcagctgctccatggcaggtttcaggatgatgtctgcattgtttttgagtttccggtacattcgaaggaacgctgcggagatctcggattccggaatgcggcccaccgggcaggacgcggcgctgcggtcgtgctttcggcaggcccagcaggtgtagccggttttcgtgcacctgcgatgaaagggtgttccgcagtatccgcaaaagattttcatggagaatggactcttgtttttcctctttttaacccgctctgctttacgctgtaggagagcctgcaccttttgaaaggcttccttgtcaatgatggcgggatgggtgttttcgacgtagtattgcatttgctctccgcagtttttcttccgaacaaacgggaagccgcaggtgtatgacttctggcagagagagtctccaatgtatttctcattggtcaggatgtagcgaatgccaacctcggtccagagtccaggctcccgatgtggcgagatgcctttagcaatcagcacctccgcgatccatctcatgctgcggcccttgaggtaggaactaaagatccatcgcaccacggcagcttcctctgggatcatctcaagatttttcttgtctaccatgcggtagccgtagggagcggtacaggcgatgaataagccttgctccatgcggtgctgataactcagacgctggtttgctgagatggatagggactcctgctgggccagagagccggaaacgctcaccatcagttctgtggtgagcgttcctgtgtcgatattttctttttcaaatcggacggtgacgcccataccggagagttctcgcagggaggcgagacattctttggtgttgcgggcgaaacgggctactgacttcaccagaatgcggtcgatcttgccctttcggcaatccagcatcatccggttaaagtcatcacgcttgtccatgcgcgtgccggtgaggccctcgtcggcgtacacatccaccagctcccagccgtcatgctgagcgatcacctcggtgtagttgcggatctgggccgcataggaatgcagttgatcctcagagtctgagctgacacggcagtaggctgcgacacgcaggtgttccggtttgagtgcgtggggcgcgatctcttttaccgtagccatcagcaatcttccttatggagcgcagcggcttcggccatgcggttgacgcagttgtaaagattttcgataaaaatgttcagggcgtgtaggctgtcaaagccattgataaagatggtgcagtcgtcctgcacatatttatcgccatcctgataccccagcttttccgctgttgctgcctcatggatgcagacccaaacggaaccgtcgctgcggtaagtttgccttaaataataattgtattccattgcgttttctcctattgacttttgtggtagcacacacactaccacaccatttgtggaatagccagcactattcccaaacagtctgtgggcggtatttctccctggcaagttttttggcataggccagttccgttgctgtcagaaggcccttttcggataagtgttccagcatccgaacggccagccgatactgcaattccttcttggcatcgatcatgcgtccacctcgaaatagctttccggctttagctcccgcaggaacttcgttacagcccgcaggctgctcgtggtgcgcatgtccggcagagcatcccgcatggctgcgtagtagcggcggccatggcttgcgcgctcgtccaagatggcaatgacgcaggtgtcggtctctgtgcggatggcccgtccaaagccctgacgcagcttgatctgcatctcaggcacggccacattctgaataaactggcgaagggatgcgtattcctcccgctctttttccttcagtgcgtccggataggcgaaaggcaggcgggggatcaccagcagggatacgcagtcgccggggaaatcaaagccttcccatgcagcgcctgtagccaacagcacagcccccggcgtttgccgaaaccgctccgtcatgtgcatggcgtttctgcccaaggtaaataacgggaagctgagttcctgctcccgcagcctatcctttaccgccgacatggcggcgtaggaggtgaacagcaccagcgcatggccccaggccgcgcggatgagttccgcgatttcatctgccaattcatcatagtacgtttccgagctttgactcggtggaagctgcggcaagtacagcagacaattccgcttatagtcaaagggagaaggagaaactgactccgttacgcgccgcccgtccatcagtccagtctgcgaacgaaaacggtgaaagtcatcccctacagccaaagtcccagaggccagcacaaaagcgtgttccgacctccacaggacctggcgcatctgttctgtcaaatctgaaacggtggcgcacagcatggttccgccatcgccgtcatccgctgtgtagaggatcatattcgttctcggactgcttaagagagacaccgtgccgcgcagcttttccagctgcctgcgcccctgcgccgacagcagcctgccgacctgcttctcaataacaagaagagaacggctggggatcgtcagtaagcgaaggtacgcaaccaggggttcggtttcctctctgggctgcgtgagtttgcggagcagcggccccatcgtgcctgccagcacgtctgctgccagcagataccgttccgcgcggagctggtggatcatgctctggatgtcaccggctgtcagcgtcatgccaaacatctcccgcgccgcctccggcagcttgtgtgcctcatctacgatgatgacgctatgctccgggaaaatggggcgtctgccctgactgcggtggatggcgtctgccaccagcaggttatgattgcagatttgaaacaaaaattgatttttgtcgcaggtcttgaggaaccgctgatagcggcagtccttctgcttgcagtcgcagacctgcggtacgcagacacgctcccggtcatagccgctgagatgagaaactctgtccatgtccagcgtttccctaagagtccggagcgccgtcagcgcttccggatttttctttgcaggatatacctgacgcagccgcctgtccaatcgctcatcgcagacataatggcttttgcctttgcggatgaccgctttcagtggcttggtaagaatcccgtccgccagtaaaacgcaggacagcagcggcagatactccgtcagcaccgcgttttgcagcgcgatactggatgtggaaatgatgatggggcgggcgatctgccctgtcgggaaagccgacgctgccgtggcagccgccaggtaggcgtaggtcttgccgatgcccgtcccggcatcgcacagggcgatcctcccgtcctgcatggcgtccagcatccggtgactcaattggatctgctccggacgctgcgccataccgtgggcgggaagaaggtcctgaaaaatatggttgatcagtttatgggctttcagcctgttgtcattggtattcatccgataatttcctcttttcctgtcatgctttgttttcgtttccaccgtatttgcagcgcgcgccccggtgggaaaggggaacaatacggacaaggtccggcaagaccttcacgggcgtatttccgggatctctactgctttcaatcccggagcagcccagcctcttcatgctggccagtgcattgtgtctcattatctgcccagacagcgtctctgcgggcggcgctgccaacgccgcccctgcgcaggtaaaatcgctcgccgcgggaagctgcaaggcttcccacgggtcgtggcgcacactgcgcggatcgctcttctgtccgggtggttatccgtattgctggtatgcaattttcaaggaacagcgaggggcattcggagcccctcactgtcctcccgaaaattgcgttcggtgaatacccttatttcgaggaattttcaaaaaactttttgagatcccgcaggatgcggtctctccgcttgatgaccgcccgctggctgacgcccattctttgggcgtattcccgtgtagacgcgccgtcgaagaacagggcgttgatgagttcccggtcggtatcctttagtgacagcagcgccagcaaaaggatctgcttctgttctgccagattccgaagttcctcacgctccagtgcctccgtttcggcgctgggggccgtttctgctccgacatagtccggcaaaagcgcatcttcctccatctgctccagagagagcagttttccggaggactgttcctccgtgatatagcgctccctgcggtttgcctgcgcataggcgaggtaaacattctccggcacctctacgtccatgccgtctacagtgatgatattggcgatgacttcgccaccttcgcttcgaacgcgccgatagttgcgttcttcctgccattttttcatgattcatgactccaatctcagatttttttgaaatgtctgagattgggtcacggatatttagcgatatagggctgccagcgtctgcgcattgtgtgcctttccgcttttcagccgaagaaaggcgcaaaaaaagagccttacgcatagctgaaaagctacttgtaaggctcctaactcaatgttcccgattgcgtctctcgcccttcccaaatcgcagcccaacgaagtgggtgcgatttggagaggagaagcagcgaagtgaacaagttttcgcgcttgcgcggaaacgagtgatacgcagcttgcttcgacgatgggtggctggtgcgcttgacgaagtcatatcaattggatttttaatttatgcctgaacatatcccataaaggggatgggcgtgtggatcagggggtgagcatccggtgtcagcaccgtgatgccgatctgttcgccgcacttggggcatttggcgatcaggtcagggtgttccgctctgtgcagagcaaacagcctgtactgagactgctccgcaccactggggatatccgcgatacggcccttgccgcacagcggacagcgcagggaattggtttttgacatagcgcctctctttctctgttctcttttttgagaacagcacatgaaaattttttacagcaggttatggttctccaaccgaatgcgcatggcctgcttggatacctgaaagatacctgccatatccgtcaccagctgttggttcgtccgtccggagcgcagctgatagaaacagcgcttgacctgcggcagcggcagcagaaggatagagcccagcaggttcgcctgcacttccaatgtgttgtcgctctcatcgccggaacggagcgccgcgttttcgccggtcccgctgaactgtttcttatggagcagccagtgccccagctcatgggcgcaggtaaagcgcagccgcccggtagatgcttcctcttcgcagagagagcagtcgatgaggatggtgccgcccttgacgggaagaaggtcatagcggtggttttcccagtcatagatcgctgtgagaccgtcgtcaaagatggtctcgcccaaaacccgcccattattccgcagatattgatactccagcaccagcccctgtgcctcgatgatgtcctcaatgggaacggctgcgggggaaccgtaataaagtctggggtcataggcggtgatcacatcgcgggcgatccgctccagcgcctgttcgcggtaatatgcttttttcatgcgtctatttcaccgccctctttggatttctttgcgcgctgggtgatccggtcgataaattcctgccactcctggtctgtggcgtctgcctccttcgccgtgcggagcgcggcccggacgatctcccgatccatgatgtagtccggcaggtctgcggatacccggttattctgggacttggcggcaagatccagcatctgctcggtttccaccttgctcagatgcagttcctgctccaaccgttccaaatatgcgcgcgtcggcgccggtctgcggtcgttttcaatgttgctcagatagactggcgacaagtccagctttgccgccagcgtgcgcagggacaatccgatagattgccgtttctcccgaacgaagctgccgaatgtctgttccaagtaactcacctcctatccgtgttctcttctctggaaacactgtagcctcagtatagcaaacattcgttcgattggcaagacgtgaaaaagatggtgttccccgcagggaacaccacccagaaattatttcagccacgctgccatatcccgcatttcctccaacactgctgctgggctgacgatgcgaatcttaccgctaaaggtaaagacccaactgaagaacggagggcttggcgcgacctcgactgtggcacggaaatgctgttcatctacagtttccgtctgcacattttcaccgaagcggtcgatgacgctgcgcatgatctcattatcgcacagcagctctacggtacagaggttgtccgggtacatcccaaacaccttacggacatactccgccggatcaaagtccggtgtctggactgccgtatgttccagcggttcgactgccgtcatgcgatccacccgaaattgtgcaatctttccgtgcttttccgaccagcctacggcataatagcaatctcggctccagataagggcatacgggctgaactgatagcggtagccgttatgcttgagtatcttttctttctgcggggtgtattcgtaataccgaaaggtgatctgccgttttttctgaatggcgttatggatctcatccacgctgtaatagatgcactcattctccggtttggcggtgccgtccatataaatatgccgatccaactggcgggcatgagattcactggtgagcttacccaacttttcaataagccgctcgctcttttttgccgtaataaagcgggaggattctaccgcgtccaccagcagcttcagctccggcagttcaaacatcctctcccccacgaaatatcgattctgggtgcttttgacgcatacgatgtccataccgctgctttgcaagacttcaatagcggaatatacgctcttgcgccccgcctgaatgccatgctcctgccagaatgcaaggatttctgacacggaggcaggatgtttctcatctgtacgtttatataaataccgctgtaagagcagcagtccatattgggatccgtttttcatgctgagacctccgatccaaattcatatcttctcttatagtttaatgagcggatcttattccgtcaactgtttctgaccccgtgatggtcaggcgcatcgcattttgtctgcactattgctttataatagaataccaacggcctgcacaagacctattctcttgctctctcaacgctgctgccgaagctgactgctccctgtgactatggctcgatcacctatgacaagagggttgttaccgatctgggcactggctcctttattacccttgtaaacggcaagaccggtgaactgacgttggaagcaaacagaagcggcacagacgaaggatgattcggcacgatcactgttacaatctccacgagcaactatcaggatatcactctgaccatcaacgtcagcgcggagaacaatatcactccgcaggcggacggcgcagtgacggcaacggacatcacctatggtcaggcactgaatgacagcaagatcgcgggcaaggtgaaggacggcgacaagatggttaacggtacgttcgcatgggtggacggcacaggcgctgtatcctaccgcattggcactgttaacagcacaagcgaggcgaccatcgatcccaacaccggcgttctgactccagtcaaggtcggctccgtgagcgtcatcgcaaccaaggcgggcgacaacgactacaacggcgtcaccagtgctcccttcgtgctcatgatcaaaccggccacgcccaccggcgcgccgaactacaccagaatcaccacaagcggcaagacgctgaaggacgcggcgctgaccatcgagggcagcacgctgaaccacaatgacggcaagctggaatgggtgaatgacaaggacaatgtcctatccggcaataccacggtcgaggccaacacagcctacaagtggcgcttcacgcctactgacaccaactacacgacactgaccggcgaggttgagctgtatcacaagtccagcggtggcggcagcggcgtgacggctccctccatcacggtccccgtttcctctgagcaggagaccgtgaaggtggatgcgatcgtttccggcagcaccgcagccgtggaggtcaccgacaagcagctcaatcaggtcacttcgggcggcgacatcgtcaccgtggacgtctccggccttaaggacgtggacagcgccaatggcaccggcgagacgacgttcagccccaacgcggattgcaccagagcgcagatcgtaactctcctctggcgttgcaagaagtgacccggctgaacagcaaagccgctgacatgaccacataagcgaacatcggacagcgtagcggataggctttttgccatgacgctgcgctgtcctgattttatattccgcatgcttccatactatcgtaaacggtaaataacccgtacctgctaaagcaggaacaaatatggcatacttatcgcagggaggctcgagggttctcgatactcctcgcggcattagcattatatataggggagacagcatggacgtgaatatgctcaggcgcagggcaagggcttcacgggcgcgtggatgttctttctgtcgtttgccgatgtgcccgaatgtgcgtatgaatccatggtgtggtgcagcatgaacggcgtaaccgcaggcgtgagcgaaacagcctttgcatcaggcaatgactgcacccgtgcgtagatcgtcaccatgctctaccggctgctggtcggctgacttaggatgggatgcagagctgaagcatctttgcggaaatttcaaatcaaagcaaactgggatcggtgcggcataaagccgcaccgatcctttttgcaatttcataaatgcaagctcaaacagatcaagtcagacacggcgcaccttccccgtacctcttccatcgcatctacaaattgttttattgcaggaggctctgtgatctaaaatagcaaagattttttgaaaaggcttgaaccaatccttcgacagagttaatatcacacccactggtgagggcggatgcgcaggtgtcgatgcgttctcccatatgtccgcttcccacgaagaagaaatttgatattaggagacccattatggaacagcactatctgacgaatgaacagatcacagcctttactgcatcactttttcaggcggaacggtctcgggcgaccattgagaaatatcagcgaagtgtacatgcattttttctgcatctgaacgggcagcctgttacaaaggatgccgtcatagcgtggaaggaccgcttgcaactggtagatggttattctccctctacgatcaacgcttttctggcggcactcaacgatctgttcacattccttggttggacagagtgccgcatgcattatctgaaaatccaacgccggctgtttcgagaggcagaccaggagttgaaccgtgaagactatgaaaagctgattgccacggccagaaacctgggtcgagagcggatcgcgctaatcatggaagccatctgtgccaccggcattcgagtcagcgaggtacgctatctcactgtgaaagcggcaaacgagggccgggccaccatctccctgaaaggaaagatccgcaccatccttcttcctgggaagctctgccgaaaactgctgaaatacgccagaaagcaaaaaattacctccggcgagatatttctcaccagaggcggaacccccatagggcgctgtcaaatctgggcggagatgaagcgcctttgtgcaaaagctggtgtggagccctccaaggtattcccgcacaatctgcgtcatctgtttgccacggtttactaccgcatctataaagatattgcaaagctggcagacattctggggcattccagtattgaaaccacccgcatttacctgattacgacggggcaggagcatcggcggcagctggaacggctgcagttgatctgctgaaacggaatctatattccgtttccgttttgcatgaaatcagaaactcagcaaaaggcaacttatcagttttgtgtttattttactctgcgctcgtaaaaatttcaagtagatacgccgaaaattcacctctaaaagtgcagaaactcagccgtgtgggatatctacttgcacggctatagaaagttacgcccattttcctcaataaaagaggaaaatgggcgtccttatttgctgtcttttgatgggcatattggaagcagaggaaacggaatatagattccgtacatagttgaaaagacttccctgtctgcgctgccggatcaatatcactgaatgagcataagcaaaatgactgtcccagccggcaaagcagttgagatgtgcccacctgcagggagctgcagaatatataaatctctcacaggaggatcaaaatgaaacgcaaagcattatctctcattcttgcgtttgccatggcagtcagtctgttcacggtaggcgcaagcgcggcggagcctacctacggcgacaccgcgggccactgggccgaggcctccatcgaacgctggagcggctacggcattatccagggcagcaacggcaagtttgacccggacggtcagcttacctgtgcacagctcgccaccattctggcaagactcctgaagctgcccgccgcaaaggacgcaggcttcatcgataacccggcggacgcctggtattatgacgctatcaaccgctgcgccgccgcaggcattctgaaaggaaacggcgatggcaccgtgacgccgaatgcgtccattacccgtgaacgggccatggtcatgctggccagagcgcttgggatcgagccgctgagccgccctgacctctccaggtatgccgacgccgcgcaggtctccccctatgcgcagggctatcttgccgcactcattgaggccggtatcgttggcggcgtgaccgccgaccgtcttgcgccgcaggacaacatcacccgtgccgctaccgttaccattcttgaccgggctatccagacctatgcggacaaggccggtgcggcagtcagcgccagcggcggactggttcttgtggtagccgatgacgtgaccgtcagcggaaccatcggccgcctgcttatccccaccgacaatatcgtcgtgaccgtcagcggcagcaaaaacatcggcagcattgcgatcaccggcaatcactccacggtcattctggacaacgccacggcagatgacgtgacgatcagcggcgtggacagcaaggtcgagacgaaaaacggttcgcacattaaaaatatcgctctgacggagagcgcttccggcgcagttgttgccgcaggcagcggaacgaccatcgacaatgttgccaacagtgcaccgggcgctgccgttaccggctccggcacggtgaaaagtgttgcgtctgacaccgacgtgaccgttgagactaagaacaccgaagtcaaaaacacgggcagaagcgagatcactgtgactgacgccaagggtaaggaaaccactgtcaagcccggaacttccaccaccgtgaacaaggagtccgcaagctccagcggttcctccggcggcagctatacgcctccggcgcagcacacccacacctggaatgcaggcgtcgtgacgaaggaaccgacctgtacagaggctggagtcaagacctacacctgcacgacctgcggcgcgaccaagactgaggagatccccgccacgggccatacctggggtgactatgagattacgcatgctgtcagcggcaggaatggaacgaagactcgtacctgcagtcgttgcgatactaccgagagtgcacctctcctttataagttctaccttggaattgaatccggcagcactgtcgatatgacggtcggcgaagactacaccgccgtgttcaccatgcctgctgcgggtggaacggtcaacacagacagcattgccctgacggcaaaaatgcaggacgttgcatctctgggcgtggagggcgtgaagtctcacaccacgaccatcagcaccggccttggcggaacagatgtcactcttaatacttggctgccgaattgctacaattttgagggtgctaccatcaatgccaccatcggcgacaagagctgcacctatacccttgacgcgatcgataaggctgattctaattctaatatgtacacgatcaccgctaccactgatcccgcggcggccagtgccgcctggcaggcgctgacctctcacgtcaccgcaggcacgcaggcagatgacagcaagattgtgatcaagaacggcgcttacctgatgatcggcactgaaaagctggagttcacgagcagcgaggtcggcgacctgacgctggacaacttcaacaacatgaatgccctcaacgagaccattcgtaaccatgtcaagctgagcacctgcgatgatcagggcggcacgatcaccgcttacctccccgccggcaccacgctggccgtcggcagcagcgttgccacgctgaaggacaactgcaccatcaccattacgctcgatgcggatgagatgggcgccctttccaccgcactgtcctctctgaaaagcaagacggatgcgacaatgatggttaaggaactcgttcagcagtttgacaacctggttggcgtgattgacgcaaccggcaatgttacggtgatcgtcagcttttccgtatgatgtaagcataaatcatcctttggacgggagcatattgctcccgtccaaaggtactatttcaaaagaagaagaaagagagggatgcgagccgtgaagcttttaaaagtgaccaaaaggcatcttttcctcgccgcgcttctctgcgcgttgaccgtaaatacggcggcctatgacaactatcagtcaatcacaggctatgaatcaccgactgatcttaccgtgcaaacaggcggcgaccgcctttggacggtggcggatggagtattgcagtccggcaacaccggggtgggcagcaccgtttccgccatcaaggtaaccgttcctcaggcgggtgtgctgcacttccaatataaggtttcttcctcctataaaacgggtgacacaggaatcccggatggtgcattggcggaaaacaatcccgactctctggtcatctgcgtggggacggagatcgcggcaggcacatcatattccggtctgccgaatggataccagcgcttctatggcgagcttgactgggcggacggctccgtcacagtggatgatgcatcggacgtttactttgcctataagaaaaataacagcaaggattccggctccgactgcgcatggctgcggaacttctccttcgccacggacacctctgcggaactgacggtgaactacgatgaaacttgcggcgatgtcaccggcgcgggaagctacgaagcgggaaccacggttacactgacggcgctgccaaaagacggctgtcagttctacggctgggtggatgccgccggtacgttcctttcggatcggccggagtacggagtgtccgtcaacaatgacatgacgatccacgcggaatttgcctcggagggagcttatgaggcccgccgcggcagcaccttctacacgagcctgacggaggcgctggcggccaataagaaaagcgacatcttcctgctcaaggatacgaccctgacggaagacgccgagatcccatccggtgtgacgctctacatcccctacgaggagcattacaccacggattataaaaacggcggcgtcagcaatgacaacaaaatcacggcaacgcctttccgcctgctgacggtcaacagcggcgtgacgctgacggtaaacggaaccctgcggcttggcgctgagatgggaaaaatgactctttgctatcagggccataacaacggcacctatggcggcgtcatcaacgagggaacgatcgccgtgaacggcaccttggacagctggggcctcatcaccggctccggcacggtaacggctgttggcggcggcaaagtttatgagccgttcatcgtctgcgactttgccggtggcaacaacctgaaaaatctctatcaagcagacgcagcgccctttaagcgctatgccatgcagaacatccagtgcaccctgcagcttgacagcggcagcaccctgtacggacggggctgcctgtatggcgacagccgctacaatgaggtggagattcccattgctgcctccggcggactgttccagctggcggacggcgctaccatcacccgaacctatgactctgaacggcaggtctccgcgttccccggcatcggcagggagaactggaccgtcagcggcggcatgaccttcggcgcactggaaatgaatgttttgggcgttcagatcagcacgggggaatgcggcttcccgctgccctacaacctgtccatgactctgaaaaacggcagctacaacattccgaaccatctgcgggtcatgcccggcgcggccctgaccgtaggacgcaaggcgaccctgacggtgggcggctccctctacgtgctggacggcttgaagcagggaagtatgagcggcgtgcgctatgcgtctacggaacagttgaagaacagcggtttctccgcctgcggcgaactgacggtggacggcggaaaactggcggtcagcagcggcgcatcctttggcggcgtggtgcagagcaccggctccggaagtatctccattgcggagggcgctgtgctcaccaacgatgtgcgggacggcggccagggttattatgcggacaataccgccatctttgaaggcttcaccgcccgcgcgaacatcggcggcgcattgcagaacctgacggcaggggagtaccacgctgtcggcaatgatgcctttaccctgcccggctacacggtgaagtatgtcaccaatggcgagagcatcaacggcaacagcggctatgtgccggagtataccactgaaacggttaccatcgaccagcccatgatcggcgcttgggcggcgggcgagtccgcgccgtcccagtatcagatcacggcggtcaacaagacctgctatgacgaggctgacaacagctgcaccagtgtggatcatgagctgaacggcgacacgctgacctttaccgtgacgaccatcaagagcgcatatacgcatctggtgcaggtgcagctcggcgagggcgagatccggactgttacccccggcactgacggcacctacacggtggccggggtgaacgatgatgtgaccatcattgtgaccagtgtgttgaagggtgatgtggacttagatggtgcgataacatcgaatgatgcatcgaccgtcctgcgtcaagtggcgaagattccaccttatctcagcgagattgcgagtctgactgctgatgtggacttggatggcgcgataacttcaaacgatgcatcgacaattttgcgctatgtcgcaaaattgattcctacactttaatatttgttaaaggggaagaacaatgaaacgaaaaaaactcttagccgtgtttcttacactggcaatgttgctgtcgcttttgccgacaaccgctctggcagcagatgcggcaacggttactgcgggtagcgcggaagtaaatgcaggagattcctttagcattgatgtcagaatcgcagataatctgggcttcaacaatttccaactgcaagttgtgtacgacaagactatgctggaactcacgaacattgaggacatcagtgatgacagcatcctgaaatctgagcttgttgtaaatccgagcgaaggaatatttacaactgcggctacgagagacaacacaaagaacggcgtaatcgcaacgttgacttttactgctaaagatgcagcgaagggcactacgactgtcagcattgaaccgcttgaaactacatctgcattgatgaaagtttccggctttgccaatgcctccgggcaggctctccccgtgaccttcgtccccggcacgatcacggtgaaggccaacacaacggatcggacggtcacctttatgaacggcacggaggcggcgaccgagaccgtggctaacggcggaacgctgacctccattccggacgcaccggctgccaccgacggccagagctttcttggctggtatgcggtggagggcacgaactatgtgctgagcagcgtggaggatacgatcaccggcacggaggccagcacgcaaaccgccatcacggcagacaccacctatcatgcgatctgggccagcagcgccatgatcgccgcgggctacgcggctgacgcaagcggcaagacgacaatgagcgctatttctactcctaacaatctgcaaacactcattaccgattgcaataacggtaaagtcaaactgctgagcgatgtggatctcggttccaatcacatcgaaattgcgcagggtaaagcaattacgctggacttgaacggtaagactctgtcaagcacggacagtaatatacctttttggggcagtacggctccctgcggtaccgtttatgttgaacaaggcacgcttacgctgtacagcagcgtagcggaaaagggcacagttcattatacattcaccggaactggaaactggaaaagtttcggctggggcgcggttgaaaatttcggcggaacgattcctgtaataaagaatgtcaccgtaaagacaactacggttggcaagggtgctacgaatccgccaagcgctcttttcggaagagcttatgccgatgctacaaccgacaatccggcttttgagagtgtttcagattgtgcgtttatctgtgacaacggcgcggcgtttacctgtgttggcgatagtgagggtgaaatgaaaacggcaagcttcaaaaactgcacgttcaccggaaccagcataggaaaaagcaatggtgttattggccttgtatatacaagggttaatgagtttaccgattgtacgattcaggcaaatgaaaattccgctgcggacgggactgcattgagcttgagcgaaaacgcaaagatcatttctgtgaccggcggaaccatgaccgctcccaacggcatctatactacatcatattacggtgatgacctcacggcgattgaaaaattcaatccgaactccgtaacggtaacggctgaggatggatttttgatgaacatcaccagtggtggttttggaaaggcggtcaatgtaaacctcaacggcggcaagtacaatacaaacaagatagtacttgagaaaggcacaaccgttacctaccctgcggggcagaagctggttgctggtgaagacggctggtacacgctccagacggcatacaccgtgaccttcaagaacggcgacaccgtgctgcaaaccgtcacctgcgggaacaacggcacggcggtctataccggttctgctcccaccaaggctgcggacgaaacctatacctacaccttcaacggcaagtgggcggacgaatccggcaatatatacaccggcaatcaagtcaccaacgttacctccgacctgacggtgatcgctcagttcgataccgcgtccgccgaggtcgtgaccctgaccgttgacggcaattccaagaactacaccggcctgaaggccgccgcggacgcgctgaacgcctccagcacttacaacagcgcggagatcaagctgaacgagaatgacacggagaccgagccggtcaccgtgaccaagagcgtcaccatcgacctcaacggacacaatctgacggcgaacaccgctgaaaacggcatcactgtctccggcggtgcgaccctgaccttcaaggattctgtcggcaccggtgtttacaaacacacggcgacaagagcggaaaaatccgcgatcctcgccaacgacagcggcacggtggtgaatatcgaaagcggcaccattgaggccgcgaagggcaacggcctgaaggtggacggcgctgcgttccatgtttccggcggtaccatcaccggcgggaacaatggcatctacgtggcgacccagaatgcaagccccgtttgcaccgtctccggcggcaagatcatctgcaagggcaacggctatgcgctgaatatggatcaatcggttgctcaatgtatcgatctctccggcggcgcattcaagaatacggtcaataccacctccgcaaatttgacggtaagatcaagtgcaccttcctggacggcaagtccctctccccctctccgaacaccgagggcttctacgaagtacgcgaggtgggcacttacacgttcgtgctcaaggctaataaggaacactacaacgccggggagaccgtcaccgtcactgtctccgcctatggccccgacagcatcaattccttcggctttacgcccagctatgacagcgacaagctggaactggtgaacgtaacttctgctaacaaaggcaacttcacggtaaacaatagtactggcaagagcggctatacggtgtctggcaacggcatcgccctcggcaaggcatccaccgacgccaccgagcttgtgaccatcaccttcacggcgaaggagaacattaacaatacgacgaccatcacgctcatggatctggagatgaccccgagcgggagcgaaaccagcgacaaagccgtcgtggagaagaagctcaccgtcaatctgcacgacattcgcgtgacgctgacggcggcgaacggcaccatcaacggtgtgaaggacgtgaccctctatgccaagtacaatgtggctggcctttacagcgatccggctcgcaagacgacggccactgtcagtgtgagcgccaatgacggctatcgtctgaacaacaagaccggcgaaaagctctggaagtgcggcgaggtggaatatgccgattttaacgagatcaagggcctgccctttacagacagcaagaccttcgacctgcaaaccacccaggtctggacggtcagtttcgacacaaacggcgtggagggcggcgaactgagcactgacgctccgatcaaggtggatgacggcacaaagctgagcgcagcaaatctcccgacggcgacggcaaacaccggctatgccttcaccggctggaaggcgggcggtaccgcgatcgaccccgacgcatatacggtccagagcaatattactctgaagccggtgttcaccgtgcagagctatgccttcacctatacgcagaaccagtccacggtcagtgttaccgctggcgtcgaggctggcaaggcgacctacggacaggacgtcacctttacggtcgcacctaacgccaagcatattgtcaaacaggtcagctacaccgttggcggtgatacggccaagaccatcgtaccggagaacggcgtgtataccatccccggagcagagatcgttggggaagttgcactggagatcacaaccgtgccttattacacggtgacgtttaaggccggtacgggtacggagctttcctctaaaacggtcttcaccttaggaaccggcttctacacggatacgacctttgcggcagacaaggtgacggaagcgcctaccccggccgcacagactggctaccgtctggcagaccataccggcgaagcgctctggaaggatgcaaacggaacgggttacacggcggagaccgtcaaaacggcggtattcaacgccgataccgtactgaccgcgcagagcgtaaagacctacaaggttacctttgagagcgcggatcccgcaaaagcaaacatcaccggcagcctgactttggacgcggatacaacgatcaccgcaattcccgcagcgacttatacggcgggctacaccttcaaggagtggcggatcggcgggattgcctatgcaagcgatgaggctttgaaggctgtggaaatcaacagcgataccactgtgacgctggctgccaaggacgccagctacagcgctacgctgaatggcggcgccgcggcggagatcacggtcattacgggcattacgggcaaccaggccgtccacggaacggatatcaccttcaagctgaccgcaaaacccggatacaaagtgacggcggttgcctatcaaatcaacggcggcgctgctgtgaccctcacaccggcggacggcgtgtataccatccccggcgctgccattaccggccctgtgacattgcagctgaccagcaatgaaactgtgacggtcacctttgaggcaggcgtgaacggctctgtggacggaacgactgctttcattctggacaagggcggcaaactgactgaggctcagctgaacgccgtgacaaagaccggcgttgcgggctacaccttcaaggagtggcagatcgacggcgcagccaagacgcaggatgagatcctcgacactgagtttgttgcaaataccaccgtcacagcagtttttgaccacgccacttacaacgttgcggcagcgggaaccaacggcgtgcccactaccgccacccacggcacaaatctcacctttacgccgacggttgacggcaagatcgttgtcggcgttacggcaaagatcgacgagaccgttgttgcggtcacgaagaacgcgaatggctcctacaccatcagcggcgacgccatcacgggcgatctgaccatcacggcgcagacggtggacggcagctggggcttcattggcaaggatacctacattgcgctgagcgctgacaagaagatcgcggtgctggcaacaggcaagctggacgccggcaattacctgctgaacggcgaggaaatgtactggtcttccaagtacaatgcctatgtcaagatcgttggccaggatgaaaccgcacagacgctgacggccaaacttgcgttcaatgcaagcgtggctgcgcagacgctttcctacaccggcgacatcaacggaagcaatacggtaacgcccgcggacggcggcatgatcaacgatgagctgcacagtgtcacacgcgcgtatcagctgacggagaaggaacgccttgaaatggatgtcaatggcgacaaaaaggtttcgacagaggacattatgcgcatcctgagaaagtatgtcggtttggactgacaaatgatcagcaggcaggcgcatctgcgcctgcctgccccatacggaggaagatatgagaaaaatactctctttgcttgtcgcggctgttctctgctgctccctcgtgagcacagcctttgccgcgtcgggcgattatacgttcagcgtacagacggaaggctctccggcagtcggagatacgatcacagtgacgctgagcctttctaaaagcggcgcaggggaattcgacctctacgcaatgcaggattatgtgcgcttcgatcccgcgtactttacttatgtggatcagagcctttcggtatataccgtgaaaaacggcgagcaggagcgtgcggtattttccgcttcaccgctcgactttgatgaggatggcgtgatcgaccgtgtctatgtcaatcgcgccagcaccagcgcagaaaaggtttcttccggcgttcaggtaatgcagttccagctgcgcgtcaaagcgcagggcagcaccgcgctgacgcaaagcggcgtggagatctttcaggatcccgcaaagcctgattcctatcatgcagcagctttgaacatcacgacccgcagtgccgacagcacaggcggttccagcggctcaggcggaagcggtggcaacgagtctacctatccggtcagcgtagacaattctgttcggaacggtggagtgacgccgagccggcgttatgccaagcccggtgagcgcgtgaccattacggttacggcgaacagcggttatgtgctgagtttgctgtccgtcattgacgcggagggcaatgaactggcgcttacagacaacggcgacggaacgttcacctttacgcagcctgccagcaaggtcgagatcaaggccgtctttgcgaaaaaaagtaatgcacagacatccttcgtggacgttcccgcaggtagctactatgcggatgcagtgatttgggcggtcggtaagggcatcaccaccggcaccagcaccacgaccttctcccccgacggcatctgcacccgcgcccaggccgtgaccttcctctggcgcgcggcgggtagccccgcgcccaagagcacggccatgccgttcaccgacgttcccgcaggcagctattatcacagcgccgtcctgtgggcaatcgagaacgggatcaccaagggtaccagcgacacgacattctctcccgacgcggactgcacgagagcgcagatcgtgacgttcctgtggcgcgctgagaagtcccccgcagcgggcagcagcaacccgttcacggatgttgccgccgacgcttactacgccgacgcggtgctgtgggccgtcaaggagaacatcaccaacggctcgacccccacgaccttctctcccgatgcaaactgcaccagagcgcagatcgtgacgttcctgtaccgctgcatgaagtaagcggcagcgatgcggactggttcgcaaaaggtttttgagtacaagcgggagatcgccgagatctcccgcttgccataaaatcgcttcattccgcaagggacggcactgcgagcgcgccgccccttttctcgtgatgtgcggcatcacaaaaaatgatttttttgaaacacagataggaacgacgctgctatctatggtataatggatctgttaaatcgcttatgacaccatagccattccctgcgaacaggctgggcgactaactgcacaggaggaaccaatgatgggctgtaccaccgcaccgggcgaaaagacgcctgcgcccgcaagggcgccgcacaaagaccatacctatgagcttgtatcaaaagttgcctatctgatcggtgttcctctgcgtatttttgaaaatgaacacgagccgccgaagctggaactgtacgatcagctggaacgggataaaaacgcacggatcatccggaatctctgtatcatccgaaccgctattgagcgcaattataaaaggatcaatgatacgatccacatggaataccgtgggctgctctccatgccggagttcattccttccgccagccttcagcagctttcggatgacggcgtcaacttcatcaaaaaacccagcacaaaactctgccatcatgtgatagagatcaaccggctgatctccgaccgtatcaataactgcaagggcctgtttccagtctggatcagctgggcatatctcaaggaactgttcctcatgccggacggcctgactgagagcggaaccaaagctgcggccagcctttactacgcaaacctgtcctattatccctaccagatgtatatcaactgggtgccggcagatgagggcaatatcctgtacagcgacaggaagtttgcggacttgctttaccagtggcattgcgatgcctttaccgagtatagcaaggtttcggatgccggtgcctttgtgaagaacaacatctacgatttcgtcaatgccagtgaaaagacggtcatcgttgtggactgcgagaattccgacccgtacaagctgtgcgcgacgctcagaaatcttgaccgcgagatcatgcggaagatcacgacgatccttcttttcgatgacatccacaccgtgaccgcatggcggatcctcgaaagctatacggatatccctgtcgagcacatcatgactgagcggatcaagcagaataagtcccttgtggacatcaagctgactgcacgcgcctgtcaggagcattatcagaaccatgtggattcctttgtgatcgtttccagcgactcagactactggggactgatctcatctttgccagatgccgatttccttgtgatgatcgagcatgagaagtgcgggccggacatgaaggctgccctcgcagacgccggtattttctactgctatctggatgatttctattccggcaacagtgaagacattaagaagaaggcgctgtttcaggagatgtaccgctggatccacagcaccgtccacctgaatgtcaatgatatgtttgacgccgccctgagaaatacccggatcgaaatgtcgccctctgagcgaaagcagttcttcgaacggcatatcaagcacatgaccctacagatcgatgaaaacgggaatgtccggctggagctgaagcgcggatgagctgtccgggcgtagattgtctggctgttcgcacatgcttcttccggaatgcgaaaatcacatcatgaggacctctgcctgcggacgccgttctatggacagaggtcctctgctgtttactcctgataaaactccggtcttgcgacagtggtaaatccagctttccctgtgaccaccacattgttgtatccgctggcgcagtggatgaccatgatattgccgctgctgtcaaagccgcaaacaatgccaacatggctgtcctccgggtaaaatacaaggtcgcccggctgggcgtcgctccaatcaatgggggtgcagtagctgtgctgggcagtggccccaccgccatgcccaatgacgtattgtccaccgctctggttgtagaacacccaatccaccattcccgaacaatccagtccgaagggccgcacggtgccagtggtggagcttccctcggctgtaactttcatcggcattccccagcgggaatcccagccgatcaccaaagattttcctccccaaaaataatggactctgcccaagagctgatatgctgtcagcacaacttctctgcgtgcctcgctgagatcggcggggaggttttccatgatcttcgctacctcgtcgggactcagctcaatgtcctggtagctgccgatgagcgccgcgaatagttcctgatactccggctgcatgagttcttccagcagcttccgctgatcggcgctgaatcggtattcatccgccatttgcaggtgatcctttaccgtgacggtgatatgcaggatgacggtgtcgccctcatattcaccgcctgagacagtctcgagatggtaggagattgcgttcatgtcccagaagatttcacgaaggatatccatttttccttcggtcagcgtagcgacctcatccggtgaagcgttgtccgtggtagtccgcacagcataaacagccagcacatcccgccagttggagatcatggcggcgctgcccgcgttgtccatgtccagttcgtcgtaggggttctccgccttgatttgctcgatgcgggtggaaaactcactgttcatcatgctgacagcatccggcatggtgtggccggtgccgctgctttctccggagaagaaaatgccgaagggggatgcgatcagaaggccaataaggcagatgaccagcaccaaggacaccaccgtactgccgccagccatcatggcgacgatcaggctccgggcggcggcgagaatggagcgcagcgcgcgattcgctgcctgcgcagttttttgaaccgcagtctctgccgcctttgtcgtccgctgatgccgggccatctgcatggccgcttctctggtaatgtgtgttccggtcgtggccgcatgggcggtggaggagcgcacggcctgttcggcggatagaccagtagctttgcccccctcacggatcttcggtacgatccccgcggcgtgctccggtgctttcggttcggggagccgatgcttcttcggcggctggatgctgccgcgctccttgatcctctccctgctgggtagctctctcccacgggatgtgggatattccgaacgcagcggatcaccgcgtagatcaacctggtgtcggaaccgctgctctgcctgcctgcgctgcgcctgctggcgggacgctttgcggccctgctcctgaatgaacgcctgctggccctgccgctgcggctccggcgcttccgttacggcgatcccgccttgagtgctgatgtaggcgttcttcgtcttgactgcctgcttcatagccgcctgccgtgcctgatcctgcgcaggcagcggaggagtgcttaccctcgccgcttcggcttctctggtgcggatgacaggcggcacgtcgctgtcggagctgggggcagaggcgtcaccctggggtgacgcgctctgctccgcgtttttcttcctgcgctgcttcagcagttccttttcggcgcggcgcaggccgctggcggcggtgtcctcaatggcgtcgccgccatattcatcccgccgcccctgctgggcggtatcccggagctgcgtccgcaggcgctccgagccgtcgtccagccccttgcgcagaagctcctttggggcggagacagccttttctttgacacgctcgcccagtgtcggtttttctttgattctctccatagaccgtcacgatgccagatccgagggcttcgtggtcatcatttggtacagcttgttcttgggaaaataatccacgaaaggcacaatggcgctgccacatttgatgagcccacgcccggagtccacattggtgatgtaggagagctgattatccgagatgttcagcaggcgcgccaattcctcccggtctgtggccgcctgattcagcatgatgagaaattcagagttcgccagcatggtgcgggccgtatgggactgcagcagatcctcgatattctggctgatccccgttccgcaagcctggtattttcgcattcgtttccacagggtgaagaggaagttggcgctgtactcatgctggaacagcagatagatctcatcaatatagatccaggtgttgcgcttcagcccacggttgcggatgatgcggttgaagatgctgtccagcaccaccagcatgcctaccggcaggagctgcttaccaaggtctcggatatcatagcagaggatacgggcattggtatccacgttggtgggttttgcaaaggtgttcaaactgccctcggtaaacaactcaatggccagcgccacgtccgcagcttccttttccggctggcggagcagctccgcgtggaagtcctgcagggtcggggtctgcccctgatacccaccgcggatgtagtcccgatagacctgggcggtgcagcggtcaatgatggacttttccttggcagacagcttcccggcgccgatgagctgttcgcaaagagacagcaggaattcggatttcagcaccacgggattctcgccgtcaccatagccccgctccatatccatggcgttgatatggttgggtgatgtggcggagatattgatgacctgaccgccaataccttccaccagcggacggtactcggcttccggatcgatgatgatgatatcgtcatcggtagacaacgccagcgacaccatctccttcttagcgctgaaagatttgccggaacctgagacaccgaggataaaagcattgccgttgagtaactgcttgcggtctgccacaatgaggtttttgctgatggcgttctgcccgtagtacacgccgccccggtcccagatttcctgtgccttgaagggcatcagcacagccaacgcctcggtggtgagcgtgcggagggcgtcgatgcggcgcaggcccagcggcagcgccgtcaccagtccgtccgcctgctgccagttcagggtcgtgagttggcagaggtgcttccgggcaatggactgcagcgtttccgtgtcgctgtccagttcctctttgctgtccgccaaatgcaccagcgtcaccactgcgaacatcatgcgctgatcacgggtggtgagatcgtccagcatctcacgggtctccttgcgctgctgttccagatcataaggcacgaccgcggaaaaattgttgttgctgttctgccggcgctgccagttggtcacattggtctccacacccagcaggcggttctgcatctcgcgcaccgcctcgtccgtggggacggggatgatgtcgatggacaacataaggctgcggttgagactggtgagttcgttgatcatggagtctttgatgtagctggcatactctttgagaaacagcacacgaccgtatttattgcccataacgaagtggtccttcttgaattccatgctgtccgggcagatggcgtccttgaaggagcgcccgttcttcatgttctcccggaggtcaaagcggaactcgctttcctcgcccacacggtagaagtcgtggaggatgcggagccgctctacggcgtctaattcctcacagtgggagtccatgtgattgaggcgggagacagcgtcattggctgtgcggtcgaagaaggtgcgggcttcttcaacatttttcttgtggacagacagggtgatgtagcgctcctgcacgacgctgttggaggagtcggtcaccttgtcgagcagcatggcgttgtactccgctcgggagccgtccagataatctccttggggagaaatgaggatatcctgctcgaagttctggcgattgatgcgcttgttgttgatggtgatcttggtggtggagccggtatccagagcgttcagcagttccgagtagccgaggaacatggaagtcttatcctctttggacgcgatggcgtagttgatgtcgctgaaccgcagcgttttcgaatatttgctgccgaattgaaaaatcccgtcaggccagagtcggcgaatgggaatgatgtcctgtacagatcttggtaccttgaattgttctttgtcctgctttaacgtggtttgcagggttttaatcaagtttcagagcctcctttacagatgagtgttccatgagttttgtgtatacgttttccgatttgaacgtgagccgtttcggcgtgagaaattctgagcgaagaaacgcccataaaaattgctcgagattcatgccgttgtactgaaaaaatccgcctagggcgaagggaaatgcggcgaggacacagacccagccgatctcaccgttcccaagcacagggcgcaggccgaagtaaacgccgaccgctacagctactgccagcagggcgaataaaaactgccgcagggacaggccgaaaaacaaactttcctgatagttgcgtacttccttgttgatgcgtacctccaatgtaccacctccgatatttttgacttttcccgaacagatgcttgctttttctgcccggtcatggtaccatgcccccaaactcgagaaggaggtcacggcaaatgatgttttggatgatcggcgccggactcggcattctggcggttctgttccgcctggcggcgctggcgcggctgacgatcccgctgctgtacacgatgtcgatgttgaccgtgtttcacggctggtatcagatccataccgcattggcggacaatattctgtttgcgctggtcggcttggtcgttctttcctggctgatctcgctgggcaaatgcgtctggagcttcattcaggagaagcgggaagaccgcgccgccgttgagtattttgcgtaccgtgtccgtaaagcaagagaaaacggtgaggacaccgtcagcaccgagggcctgtggcgctgaatcagccaaggcccatgagctcgtggatgatccggtcgctcatcttgatcgcgcccaccagcaccagcatattgaagatcagttcgcccacatagttccacacgatggtggctgccgccagtgtatcgtctgcgatggcgggcggtgaagacgcaaacgccgaaaaaatcacacaagccaatacgatgacacagccctccagacagatggcggcgtagctttttagaaaagcaatgccgatactgctggagggctgtcctgcaaagctggccagcggcacaggggcgatagcggtggcgataaagagcttaaaaaaacgactatacaccgtcaggatcatcacgagagacagcacccagataaaaagcgagccaagcagcgtcaccgcccataggggaatggagtcgataaagcccacatcctcgatgatgcttaccatttcgtccggcagtgctgttgcagacatggccgtcaggccggatgagtcgatgattgtcgtcaccatgccctgcgccacacggaatgcccccgtcatgagttccatgccccagctgaccgcagcctgggccagcacaaagcggataaagcacttgaaagccatctctggctttttcatttctgcaaagctgccgcaggttttgaccacgcccatgacaaaaaacagcaccagcagcgcataccccacagccttcaatccatcgttgatattcacgatgacattccagacaccgccgcccttgaaattctccggtgatgtggtgatgagctgccagatctcctccagtctgccgttccacatctccagcgcagagttcaggttgtcaatgatccagtttccacttcccattcaaaatcacctcctgcgggaagaaataaggggcgcagtctaaacgctgctccccttattcgattttcaactggtgataagggtaaggatttccttggtaaaggtgatcacaatgccgcctgctacggtgagcataccgttggcacgctgggaggggtcatggctcttgagagacaggcccacctgcaaaatgccgaagcccagcaggatgaggccaatggcgcggatcagagagaaaatgaaatcggacaggttgttgaccactgtcagcgggtcgtccgccgccagcgcaggcaccgcggtgactgccagaagcagggcgacacaggcaaaaacggaatagatccgctttgcctttctctcgaaatttttgttgttcaaatcatgtttcatgctgcagcattctccttttcattgtcaaaatcagtttggaacagcggctctcccggaatgggaggctccaccgttccgtggtggatgtagggcggcccgccgccatccatcgtatagcggatggcgggatgctccatgagctcatacttttcgtccatcaccggccgtgtgccgcggatgaacagaatacaataccggttatccagcatccgcacctcgtccggcgtcagcagttccctgccgctcatctggaagttggtggagtaggacccagaccgccctttggtctgcccgtgggtcttggtgtcaatggtggacttgcccagcgcctcggaaatgtacttgtgggtgcttgcctcgttgccgcccagatagagcagcgtgtccgagttgccggggatggtttcccaggaatccttgtagagttccttgatctgcgccatgttctggatgatggtgctgcaggagatgttgcgtgagcgcatggtcgcaagctcccgtggcagccccggcagattgaccgatggcgcttcgtccaagatgaaatgcacatgacacggcagtgccccatggtggatctggtcggcgcagtagtacagtgtttggaatatctgggagtacagcaggctgacgaggaagttgaaggtcgtgtcattatccgggatcacggcatagagggcgcactttcgctctcccagcgtgtagagatccatgtcatcatggtcggtgacagctttgatctgcggcagattgaagggtgccagccgcacagcggcagacaccaaaatgcttttcgctgtcttgcccgcagcctgcttgaaaaccttatattgccgcagggcaacgctttccgggttttcatactccattgcccggaacagcagatccagaggggagacatactcgtcatcgtcctccttcacttcggcatattccagcacacgcatcaccatggaaaaattctgctcatattccggcgcttcctggaacagcatgaggatgatggcctgcagcagtgctgtctcggacttcgaccagaacggatcggactcgtgacttcccttgggcgtcgttgcctgtatcagcgtgttgaccagcttcagtgcgtccttctcgtcccgcagatagcggaacgggttatagccgtctgactgcgacagatccaccagattcagcactcggatgtcgtatccctgctgtttcagataccctccggtggcggtcagtacctccatcttcgggtccgtgatcacatagttgctgtttgcttccagaatgttgggcttgacatagccgcgggttttggccgcgccgctgccgccaatgaccagcacattcagtgagcgccggtgcttgtgggtatccagccccagccgcacatggcgggtgaggatcttgttctgcttttgacggaactgcgcgttgagctgccggggagagccccatgcggcggagccgtgttcctctccgtcccgtgttctgccctgtccggaagcatagagacacagccccatgagatacgcgccggtgcagacgagaatggacaacagactcttgtctgtccattggatctggaagggctgttccagcgcggcagttaagtttgatagcagctccggcagaccgccgccaagggactgggcaatcagcagcgccgcccatatcacagggatatagaggaacaacgcaagtaccagatccgttgtttgggatgtctttttcagccgcatcacctcctgcataaaaaatacgaggtcggcagagcattccactctgccggccttactgacgaaacggctttcttactttgtcctgtccggtcgtactttttgacggatcttttccttggccggggcagacttctgccgggtatccagctgcgcctgatagcctttcagccgttccagaaccgaaggccgctcattcgacatcgtcccggcagccgtttccctgccgctggatgaggtcgatctgcctttggtatctggcaagtctgttcccgaccgagattctttttttggtgccacctcctgccgcttgcccacaggcggtgtcacaggcgtttccccctgctgggggcgttgctgttcgcgctgcggcgcctcctgtcccaaacgggcttcctgctccttagagggggcatcctgccgcgcctgctccggctgcccggtatatcggatgcgctcaaagatcatattggcgcggtcgatctccgttaccggcatgatcacatccacgacttttcccttgttatccgaatcacggatggcagagaacaggatcttctgttttcctgcccgctgcctgaattgctgatactgctccggagacatggcgaaccgccgcacatcgcgggtctccttcagcatctttgccagattgactttgccggaaatggtcttgtgttttttcgccagcgccatggtgagcgccagtacatttttaatggcggagccgctcagccggacagcgacctcgctgccggagagcatcatgcgtaccagctggtccgccgcttcaccgcctccgatgttcatgttcccgcacctccttctggtgttcttctgttttctggatgtcctgctccattacaggcgtctgctggtagatctcccggcagagcttcagcttttcccgctctgcccggatcttccgattcacctctgagagctgttcatacacttctgccttttctttcttcagcacctcctgtggaatgccgctgacctccagcagcttcacggctttcatgtactgctcaaactcccgctccatgccggtgagcccttcctcgtataacgctctgctgggttccagtgcctccgcatctgccagcgccgcgtagagcggctggcgtttcttcttccgcacattgaggagggtccgctgttttgtcaatctgcccagcgtttcctctgtgcgatgttcgaatgccgccatgtcagcaggcgttgtgatgttattttcccgcaggaatgcgaactgcgcctgataccgctcgaagcgcatgaccgcctgccgcagatgcggtgtcatgcggggcggatactgtcgcttttcgatcttgcccagcagatagagataatggacatagagggcaagaaaaccgctgtatctgggatgcttccggtacggctgatacgccggccgcgcaggcaagacaggccgcagccccgcttcgatctgttccaggttgccctggatggcagcacggattccgtcctctgtgaacaacggatctcgtctgccagggtactgaaatcgctcctgcccccgcaggcggaagccgagcctgccgccatgatggatctcataccccttatgctccatgagcaggaagaagtggccgaggtcgttggcgtcccggatggcatcccgcagatctgcctccagcatggaacggaaggtgggctgccccttggactggcgcagccactcaatgtagctgaccgacctggcaggcgcgccctgcacgatgacggacaatccatgctctcggcagagccggtctgaaatggcacggatctgctggtagtagctttgctgcgtactgtgatacttttcgccggtatctgcattcaccgaattaaatacaatatgcgaatggatatgatgccggtctacatgggtcccaatcacaacctcaaagccgtccaagtgttcctgcgcgaatgctttcgcaatttctaaagcaagttcaggtgtgatttcaccaggcttgaacgattgaatgatgtgatagcattgacgcttatccaatcgtccggtttccagctttgttttcatcatctcgcggtactctctccctggatcgcaattaaaatgtgctgttaaaatatgcccatccgttttgtcaccgttcagaacataatcaatggcttcttttaagccgccgttacggggcaggattttcgtaacagccattacttattcgctatccggaacataagctcatatacctgatccagaagatagagtccccgtttggcatcctccggcttcgcaattcctgcgttgacgctgcgggcgatctggttgatgttgttgccgatatgatgtatttccgtccggagatctttaatttcttttgttgggcgggctttgaccggtcgtccctcaataagccgtgcaagatatgcccgttttgtcagcctgcactctttggcctgacagcacagcagctgatactgctgtgttgtcagtacgatgtgcagatggtgttctttcttgttctcatccacatttttctccttcctgcggcgtatagccgcaagtttttccgccagcaggcggcataggggaccggggtatcctcggcaagctgtgcaaatgtacatttgcgcgatgcttgcgccagcgccgcccacggcggcgttggctccggccctgcggggcaaaggctctttttcaagtggtaggatgattgaaatgttgtgcgggcgcagcccgcttccttgcaaaaagaaatcagcgttccgggactgaacgctgacgaagacacttttcatttgcgcgctctaccggaatgccgtccagcgcgagggctttcttatccgagataaatgccgcgtacctggcatatccaaaaccttcggactccaccagcaggccggtgttcgcatcttggccggtgacgaacaggcagagaaatgtttccgatttttcgtcgaacctcatattcgatccatttcgggatataaaggaaacatcccgccagagctcgttcctatagcggcggtactgctctttcggcagttcaatcacctttgtgatctggaaccgcgctttctccgggaacggagccttatcgagcatatcccgcacactggctgctttcctataaaaactggctgcgttttcagacatagttctccttccttgggcagggtgttttgtagacaccctcatagaaaaaacagggtgtcacagtgacaccctgctcgttcatggaattatttagcgctcaatttgatgctgtttcttcttgacgggttgcgaagcagactgaatcaagtcgacaggaagaacaaagccttccacctgctgataatagctctcttgttctttggtgaaaattttctcaaggggagcataattttcgctggactgcgcggtgttcaatgcatgataatactcgatttttttatcgtcacttataacaaaggggagcaagttatttttcaggcactctttgaacaggataacacggccggttcttctgttcccgtcctgaagcgggtgtctccgtagcgttgatcgcgtccgccgccttgactgcggcaatcctccggtttagcatttgatccatagataccacctcttggacgaacttctgcttttattgtaccgatctccctgcactatcgcaagccattttggcgaacagcagtcgggtcacgcaactttttccagctcggttttgattctttcttttgccagatctgcgtagacatccgacatctcaatgcctgtggcggagtagccttccagaacagcggccagcaccgttgtgccggaaccggcgaaggggtccagaatgtggccgcccggttccgtgatcttcacgatgtcccgcatgagctgcaagggcttctccgtaagatgaatgcggttctgcggattgccatacttgaatacccctggcaggcagggcaccggacggctgatgggcatatccccgttggagccccagacaatgtattccgcctgctgacggaatcggcctttctgagggcggctgttgcccttatcccagacagcagtgccgcgccagatccagccggcccactggagagcgtctgtcgccgcaggaagctgccgccagtcgatgaacatacacaccggtgcgccgggcttgctggctttcctcgcctcatacagccactctgccgcccagcgggtccaggaacgctgatccttggcatccccatcaaagggaggcggcgcgttctcccccatactggaatactttctggcggtggacttgtttttctcggattgcgtccggcctccggaagcatacgggggatcggtgatgacggcatcgaaggtgccgggggcaaagccactcagcaccttcagcgcgtcgccgtggatgatctcccatttctgattatcgctcatgcgttggattctccttctttttgttatttgcggggatgctgggggatagatccgtttccacgtattcgctgatgattctcagcgcttcttcatagctgtgacagtcgccgcccataatgcggttttgcatctcctttgccttgtcggccatgccgtttcgccgcagcgttcggctggcgagagccatgagattaaaaatgttgccgttctgcccgataagagggcaggacggcttttgacgttcctgatccaatgtcttatcgctccttcttgccggagcgccggggcggtgtccggccaatggctttctgatccgtcatcacgggaatgcccagatcaccggcgcggtaaatatgcttccacatgtcatctgtccagatgggtccgtagacattgagctgctggcaggactccaaaagccgcagggacatctccttgacttttttgtcctgttccgggtgttttgggtccgtgatgggcggaaacagcagatgcggacagatggggatatcgccgtctgcgaacacctcctgggccttctgccgggcaaattcaatgttcttttccacatcgccccgcagcggagcacagataaacaccagcttcgggccgtcctgcgcccattccggcgttcgctcccgaaacatggacagatactgcccaatggcctgacgcagcgagtcgtaatccgcagcgctgggatgatagacataccagtctacatcgccatgatcatcccacaggtggggcatgacgccgctgcggaagttcgggttgctggggacaggcttcttgccccacacgtccttgaactgcagcagcgttctgtctaccacgccctccttgcggtttagaaccgtgaggcggatggcgtcgtattgatcggcaacatgggcagagaagaattccgcccgcacgcgcagatccttaccaagttcgcctacgcagacacgaccggagtattgcggacgattcataaggccgctgccatcgaacagctttctgagttcctgttcataacgcgtcatcgttccatccctcgcttcttcggcttttttgcttggggagactgctcctgctggggcttgaggatgtccttatccttactgcgcaggacgcggcggccgctgtcggagatgtggaccgtaatatctttcaagtcgttggagatctcttcgtggggcagaacaataatggaaccgctgaagcgcaaacagccgcgcacggtcccgaatacctgacaatgcccggagaggagcggcccttccgcacggtcagcaccgcaaaggagctgcgcacagccggatgcgcgggtacggccatacatcaatgcgcctctcagatatgcgtcatcttccacgcgggcggaaccatacagagcggagccataggacacataggctctgtcacaggcaatggcgtcattcatcagaattgagtcctggtccacataggcgctgccgcaggcgatcgcgtcattgaagatccaggcagcgtcatccgggtcaacagccaaattgctttcactttccacgaagccgcccaggtctccagcctttgcccaatcgccaatgtcctgcaaagcacgaatgcggtggaggaagggataggtcttgtgggcgatgtcagtgatctcatattttgaattgctcatttttcatttctcctttacgctgccatttcgaaggcattcttctgcgtgccctctgcgcggaaccgggcatcaatgtccgaaaaggtttccgcacggttgaatttctcagacacctttccggggagcgcctgcagctccagcattcttgcccagagatctggatggtggtcatagaggtgtcgcaattccttcttcttggcattgggacagaaccagcagccaccgcgattggtaaactcatagacaggcgacagcagccccgccttacggcagagctgcttggcatcatcttccgtatagaggtacttttccaaaagggacacctgcggcccggtcaggcgcagcaggcgttcctgctcatctcgggcgatgccgatgtaatgcaccgtatcaggcggcagtgttttctggtactggcggatggggcggatcttgcagtcccgctgaacatagcactttccgcagataggaaatgagcgcagctttcctttcttcggcccgcgggtgacctgtccggtaaacaggtccacataggtcttgtccgagcgaagcacacggatcggtacacccatctgctccagtcgcgggagagcggtgttgtagataaagtcccgatgctccggcacctcgcctgaaatggttttgtcgaacatcacttcgcagtagaccgcctcatccagaggctctccatgctccaacgccaataagatcgtggcaagagagtccttgccaaaggaacaggatgcaatgtgcttcaacgccgcgacaccccagcttccttggcgcggcaggcacattccagaggttctgccatgtttgtctgttcccacggggcctgctcatgggtgaagtggccatagttgcagaattggcggaagatgggcttgtccagccccagcgtgcggatcatgccatccggcgtcaggtcgaacagcgcgcaaattgcctgctccagcgcattgtcgctaaacttgccggtgccgtgggtgtctacctccaccatgacaggctgagctttgccgatggcatacgccaagctgacagtgcattctttggcgatccctgcggccacgacatttttggcgacgtagcgggccatgtaggcgccgctgcgatccaccttggtgccgtctttgccagacaatgcgccgccgccatggggcgcaaggccgccgtaggtatccaccatgagtttgcggcccgtgaggccggtgtccgcttcgaagccgccctccacaaatctgccggagggattgatgaggatctccgtgcgctcatccggaggaagctcgcgcagagagggaaggatgacgtactgcgtcaagtcgcggcgcagggcgtcgagatcggcgccctcttcgtgctggcaggacagcacgacagcggcgatgcgcttggggagtccgtgttcgtattccactgacacctgggatttgccgtccgggcgaagctccggcacgatccccagtacacgcacgtgagacagcatgcgtgtcaggcggtgggcaaacacgacagggaggggcagaaactccggtgtttcatcgcaggcatagccatatacaatgccctgatcgcccgcaccggtatcctgcttgcccttgacagcccctgcgatgtcgggactctgctcatgggtgatgacttcgacctcgtagtcgctgtcgccatatccggctcgctgcacggtcttgcagatgatggcggggatgtccgggagctgggaagccgtgatctcaccagccgcgatgatcttgcccgcggtggccatgacctcgcaggccacgcgggccgtgggatcgagcttcagacaggcgtccaccacggcgtccgcaattgtgtcgcagagcttgtccgggtggccttcggtgacagactctgcggttaaaatatagttatctttcatgttcgtgtttctccttcttggggtggtttttatgagactcgggccgtacaggaacagagaacaccatttcgttggcgtacttcttctggtacttttcaatctgctgctccgtcagggaggcgaagcgatcttccgccaatccgactatgaaaaaagtgccgcagacaatgtcatacggcactccgtggtcatcggtcagagcacgattcataggtagattcaagtgcttcccctcagaattgcagatcagtgcgaccgggtcgtcaaagggatacgcagcttcgatgtcgccgcctacgatcttttgcatggattcaaggctcccgtcgatctcctgcacagcgggcggagtcatcggctccaccacgaggatcttgagtgtttctttgctgataagattccctcctttataaaataagcggcagcagcagtctgagactgccgctgccggtatggtggttagttttttgttttcaatgccagtgtctgggttttcagcagcgcattttcgagtgcgcgctggtcttcatagtcctgccaccagtgcgggcggagaaaactcagcgccttggtggcccagatataatcatcccgccccagagactcttgcacgagtccaagtcggaacttctcgtatttctttcgtactgctgcatctacgctgtcccgattcaaatatagctccagaaagccgcagagaacagccgcttcctccatcgtatagaacactctcaagcaccccttcacacaaacaggcatcattgtagcatggagagccggttttgggaagcggcggtttccacaagatcccaccgcaaaattcggcacaaacgcttgttcgattctgcacggcgtggtatactgatcgtcagaaacaagggagggggcgcgctgatgctggagagacagagaatatacattgccatcgatctaaagtcgtactatgcgtccgtcgagtgcatggagcgcggtcttgaccctatgacaacaaaccttgtggtggcggatatcagccgtaccgagaaaacgatatgccttgcggtttcgccagccctgaaagcctacgggatacccggcagagctcgcctctttgaggtggtggaacgcgtcaaagaagtcaacgccgaacgtcggcgtaaggcgggcgggaacctctttgaaaaaagctatgatgcccgtgacctggcggctgacccattgcgtgcggtaggctatttggtcgcgccgccccagatggcgaagtatattgagatcagcacccaaatctacaacgtctatctcaagtacatcgccccagaggacatccatgtctactccattgatgaggtgatgatcgacgccaccagttaccttgggacgtatcacatgacggcgcgggaactggcacgaaccatgatccttgatgtgctgcgcacaacggggatcaccgcgactgcgggaatcggcacaaacctctatctttgcaaggtcgctatggacatcatggccaaacacgtcgcgccggatgagagcggtgtccggatcgcggagctggatgaaatgagctaccgcagacagctttggatgcaccgcccgctgaccgacttctggcgtgtcggaaagggctatgcaaagaaactcgaagccatcggtatctacaccatgggcgatgtcgcacgctgctccatcgggaaggccggggactattataacgaggcgctgctctataagctgtttggcatcaacgcagagctgttgatcgaccacgcctggggctgggagccatgccggatctccgacgtgaaagcctataagccggagacaaactgcatcagctccggacaggtccttcaatgcccttatgactacgacaaagcacggcgtgtcgtgcgggagatggcggaggctatcgcgctgaatcttttagaaaagcaactggtgacagaccaggtgacgctgactgttgggtacgatatcgaaaacgtgtcgtctgtgaatttccacggggaaacggtaacagacccttacggaaggaagatcccaaaacatgcccatggaacagccaacctgccgagaaagacatcctctgtccgctgcattaccgatgcggtactcagcgtttatgacagtaaggtcgatccgaagctgacgatccgacgcctgacgataaccgccaatcggctcgtgggagaggatgcggtacaggccgaaacggaagcacctgcgcagttcagcctgttcgacgacattgccgaacaggaaaagcaggcggtggaggaaaaggcacggctcgagcgtgaacggaagctgcaggaggccatgctgggcatcaagcagaagttcgggaagaacgcgatcctctcaggggggagttacctggaaggagctaccgccagagagcggaatggtcagatcggaggacacaaagcgtgaatagaaattacgacgatatcatcggactgccgcacccggagccgcagacgcatccgcggatgtcgctccatgatcgggctgcgcagttttctccttttgcagcccttaccggccacagtgctgccatagcggagacaggaagactcacggacagccgcgtgattctggacgagtacgagatggcccgtgtcgatgacgcgctccaaaaacttcaggagctgctgccccagaagcctgtggcatccattacctactttgtgccggatgcgaaaaaggcaggcggggcctatcagacgataagcggaagcgtgaagcggatcgatgctgtcaacggagtcctcctgctgacagaccagcgaaccatcccgatcacggatatttttgatgtatcaatcgaaccgtaataaatcagtgacgaacatatttttgcaggcgccgtcttggaagcaataagacggtgcctttttcttttgccttgatccgaaacaatctgtatggatgcgacacgacagctgccgcacccttgtcagcgctcctgccctttcggttttactttattcctcttttggggactatctactttgccgctccacacctcgtcgattgttctgttccacgcttcctccagcgactccaccggcaggccgtttgtttcaaaaccttgctgaattgcgcggtaatagcgtggatacggcagtgcgggctggcggcacattggttctgccatagtgtagaccatgacggaaacggctgcgccatctgcggtccgcacagatacctgttccttggtgtagtggcgaggataaccttcgtagcggtccagcgcctgttcagacttcggtgtgagcttccacagtagaccgtggacgacactgcttttcttgggagcgacagtggcaaagccgctgccgcggaactgcagctcatagttttccagcgtcacaggacccacgatctgggcgtcggggcagcgatgcgccatctgttctaaattgatattgctgccgtaagcaaaatacagtgtctcttccatatcagtcctccagcagagtgagtccgccaatcttatccaaatggcgaaacatggcccgtgcctgcgcttctgtgtctccctccggcagcgggcaatccatccctgtggtgcggatgacattgctctgcaaaaaccagatgtagctctcaatgtccggaaattctgtggggtcaaaggtctgatcccgcaggcggcccatgatctccatggcggtaccctcgtatatggtttcttcgatctgtatcttcaaaggcttcacctctccatttctctggattttttcttcttttgattgacttcgtaactgtccttatcgaacctccacgcgcggtcaccagataaatttgccaacaaatggttgcgggtgtttttgaattcgttaccgttgagccccaaccgcaccagccagacgcggaaggtgaacagctcgttgtcgcttacggttttccgcatgacggtgctgcgctgggagatggcctgggcggacatggcaaggcacagattgacgtaggcggcgaccttgccggcgtggagcgttgagttgaagcagcgccactccaccgtgcctcgataaaatacggagtgcagattcagcgcatagtaacgggtccagttataatgctcatggctttgcacattcccctcataccagatgctctccagcgctgtgagatttttcgtttcatctgcggagagctttcgtgctttctccagcatgggttcacgaaccttttggcagtagtgaatgactcggttgggatttacctgcaacgctttgaacaggatatcttccttggagtacatgatgctcagaaggttcttcaggctctggcggttatggttggcggcgtctacatgaacatgaatgccgcaggtgttgttgaccttggccccggcatggcgcacctgacggacgcattcctgcagcttgggaagttctgcgtaggtaagtttgggcgtcaccatttccacgctgtatccatcatcgtaaactctctcgtagccggtttcggatttcatctcggtataaatactgccatcagacataagtgtccaatccttcccagcagggtccttaactttccatttatcgtagtaaccgcctgcgctgcgtggggtcgtgccgaaatagtttgccagggcccacgctgcttgctcacgggtaatacctgtcatctcgacctcgacaccaaagcactgatccttcatcccaatcatgccacagcccccgctttcaattcctcatccaccgcccggatacgcttggcaattgcctcaattacatggacggtgacgctgttgcctgcctgcttataggcctgagcatcggactggatggcgaggatgcggtcgatctgccattcctcaaagccctggagtcgcagacactcgcggggcatgaggcggcggatgcgcccgccgttttccacgatcccttggatacagctggtttccaatgtatgggcaatattacgcccaacgcgcccgcggcgggtgttgctgcctgcgtagcccaaatccaccgtatcgccggggagtgcttccttgtagcctttcttggtcgcctccttgatgagcaggacgccggagcgttccgcccgatgattggagagagtcgtctgcccataccgggccgtgaggcaacgggcggtatccgtccgtgcggggattcctgcgcacagatccacaaacggccccttgggcgggatgatatacaatccggtcttcccgcccatgccaccagcgccggctgtctgagtacaggctactccgtctgcgtcatagacacgggagccttgcggccctccgaggacttgtacaagagcttttccacctgtgccgaagacaggtaatattttcccggcgcatcggggatcaagatatccgataatgaaaagccttcgccttgattgagggactccaaaatgtttgctgttaagcacagaccactcgacatgataccccaggtcatccagtgcggagaggatgaccgaaaaggttttccctttgtcgtgcgataaaagtccgggaacattttcaagcagcagatacggaggtcgctttgcttgagccaatcgggcgatctcaaagaagagagttcctctggcgtcggcaaagccccgtctgcggccagcgttagaaaatgcctggcaggggaatcctccgcagagaagttcgaagtcgggcaggtctgccgggtcgattttggttgcgtcgggataatatcgttcctcctttcccggctcataaatggccgtatagctggcattggcgtatttatcgatctcgcagtgcccaacgcactggaaaccgcctgcacgcgtcaagccggaacggaagccgccaataccagcgaacatgtcaaagtatcgaatcaggctgtatcatctccttcctcctgcagcgcagcaagaaagccgaggacatcatcttggatgctctcggcttttggcgctgcttctgtgattttgatctggctgccctgtaattcctgacgcacggcctgacgcacagcgtccagcagttcctgctgatttttgtgttcgcagatcatgcggcacacatgctccgtgcgcttaccggcagggatgtccatcagccgtttccatgcctgccgctggatgggtgaagccatggagaaggacaggttcagccgctttttgttactgctcatgctttagttccagccgctccgtcagccattcgtagcccttggcattcagagaaacatcgtccagaatgacgggcctgcacagtccgtctgcaacagaaacatggcgcttgagcaacgccgcgccgccgccaagaaaaacagcgggcatggcgcgaacgtccagaccactctctgcaatggcggagagcaaacgcttggcgtagcgctccgcttccagatggatgatctttttcgagtcctcattcacatggctggtatcgctgcgcaggacactttcgatttgcgccgccgtcatggacaggccgaggctgcggcggatctgttcactgatttcatccaggcagcggatcatgccgagttccaggctgcggcaggtggcggcgttggggatgcggttatccagccgcatgagatccaccgtccagccaccaatgtccgccacaatgacggacggctcgttcagcaggccactctgcgtcagcaccgcggcatagccctgcggatacagagacactttggagattgtaatggtgtaatccaggcattcaaagcggaaggacaccggctttccatcccggcacaggtagtctcggaaggcttttttgtcccggccaaaactggtgagcggcaggccggtggccagatggacatctgccatagtccccgcattgcgatattccagctcttttgcaatggcggcaagggtcaagaggtaatagtcctccgcctgcgtcttatccttctggagaggctggcgtccgctgcccaccacataaaatttgccaccgtattccagcacattgctcagcgtgtacggctcgtgctcataggccacaagaccggaggggaatgcgaagtgcgcggttttcatcgcggcatagccgtgatccacgccgatgatgatagatttgctcatctggcctcacctctgcgacgatgctgtttctttttgggggccatctgttgctggtcatacgcctttccggcacggatgagatcccgcatttccttttgctgcacattccagcgcgttttaccatcccagcccggatgcgccgcgcagagccgaggcaggtactgtttcagctccggtccctctctgggaaattcaatgccgcctttgtagacgatatcctgttccagttctgccagcagcgtttcataccttgcccagtccgtctggtcataggcgcttttgcctgtaagatgctcataggcataatctcctacataactgagcgtctcaaagcagcaatccccgtaggggatgacctccgcaagagagtcagggtctgccagcgcggacagatagacatcccttccctgggcaatgagccaggcgcgaaagtcgataaatccgtcatcgctgcagccgtattccttcatgaccccggcggcgtcccacagtccaaacttatccgcaaggtcttcataggcgtggagaatgtcgtggaagttctgcgcctgctccgcccccatggataccagtcggtctttcaggaagtccatcatagcgtccatgtcctgtccgcaggtctcctttgcactctgaatcagcttccagaaagtatctttgttgatctcggtgatgttatcgttcatgtcccacctctttcgtttctttttcctttgttttcaggagatatgccaaccccatgcgccccagtgcgtccgcgcagatcgcttcacgaaacgcgaggtattccggcgtggtggtgtccactttgccgaggatggcccgttcataggtggtgccggggacgatctcccatgtgactgcatcgaaatgagctgcttccagatagcgcagaagggtatgtccgttcgctgcctcaaacgcgccccggttatcttcataggggaaagcgtcatagggctggaagccggtgatccgctgcgcggcgtgatacagccgaaagccatcctcatccagctgcgccgcgaatttacagtagatatccgccgctgacaattcacgccgctccatccgaggtctcctttctcacccaagaagcgaagcgttccaagaagcgaacacgcttgcgcaccttcccagcagacacatccagcccgttgatctgcgcctgaatgcggcgctgaatggctttcagcttctgcggatcgttgcagcagtccacgatgacatactccccgccactggcggccagcacctcacgcttgccagcctcatcccgaatggtagacatgagacgctggcccagccgcttccgataggcatcctgcaaggcatccatatcgccacagacgccgtgccgcttcaaaatagcggcgatctcttgagaactgatccgggtctccgcggacagtctgtccaggatctcccgctgggcatcaggagggaggctgggcggtgaaggacttttcttccctttcatcgcgttggttcctcctttttcggttttttcacgacagcggacagctgcatagcctgtgcaagatatttgccctgactgttcaagtattttgccatctcgcggacgctttgacagccgaactctggttcctgaaaaccgccgcgctctgtatacagcgtccatttctgtttttcataagggcagtcctgagacaccacaaagtaccgtccacatcgttctccatccagcggctcaaagcggacgtcatcgtagaggggaccgtccaagggacagttgttcttaaaccagacatagtaattgtccagaatggcaggttcagtgattcccatgaccaccctgccgatctccttcagcctgcctgcgagggcggaatcggcgcagaaccagtcgtaccagcctgcgcggatctgtgtctctcgggatctatcctgaaacaccctattgcggaacaagtcctgccactgacggacggagagcatctccctcatgccaccacctcgccgggggcgtcatccgtgggatcggtgttccgccagtctgacggcaggatcgtctgctcgatgatatcggcaatggcggcgaacacctgggcgatttcacgggattcctttacggtgtcctggagttcctccagcgtcatgcgggtaccttccgtccagcagcggacattttcttccgtggctgtcaggagggcagccttttcgtaggctttacagaacagattggcaaccttgcccctgcggtcgatctccgcattttgctgtttgaggtccttctttgccttttcatattccagcagctccgcggcagcctgttcccgctgatcctccggtatatcctgaagctggcgggtcagatcatagcccttgttgatggacagttctttcttatccagcgcctccttgatggcctccggggcgttctcatcgatctgcatgaccttgcccatcgtgcgttcgcccagaccaactgcttcggccagctccttgcgggtatctaccgctttttcaacagaaggaaggtttggcaatgttgccgaaccttcctcggcctcgctggggcggaaattctgtccgccagcagccatgttggctttggccttggcttcaatctcgggtttcagcttcagggcaattttgccaagctcccacttttccaagttgcggcggcccttctgggtatcgagcgcccactgcttggcctccagcatatcctcgaacgagaaaacagccattgtatagggaagtccgtgcttctcgcacagcgcctgacggttgtgtccgtcgatgatgaccatatccttgttgacgatgatgggggagtagcagccgtttttgatgagatctgcttccagagcgtcgagctgctccgcgctcagaggcgggagcagctcggccatctccggcaggatcacagggctgcgttcagcgctggtatatgtgatcccggtatttttcatcaggcagcgacctcgcagctggtctcatcttccatttcctgcgcgggttcctctgccttgcggggcgagaggaactccacctcgctggctttgatgaggaaaccgagctgacgctccggctcatcctcaaaggtgatggtctcaaaatcaccggaagctgccagcttgcagcccttccaggcaaactccgcacaacgctcggccagcggaccgcgcaccttgacagagataaagtcggtgagtttgttgccgtccttatccttatagcggcggtccgaggcgatacgcaggatggcgtaaggcttgccggtggtctcgttcgttttcagggtgacgtcgttggtcaggttaccaatggcagtgatcttcagcatggttcagttctcctttgttttttacatagtgtagatgatggaaaagccgccctcccagcatgggagggcggcagaggggaagttacttgctccaggtctcgttttcgccgagaatggcggtgtgggcgttagcagcttccatgactgcgtagtacgcccaatgcttgccgctcatgtcgctgaacgtattgagcttgcgaagattgtccgcaatatagctctcatccgcttcacggcccagcaggcggttgacgatggtgacgacctcagctctggagatgttgcggtctgcgcggaaggaaccatcctcgtagccgttgatccagccgctcttggcagcggctttgatgtactcggcggcccaataaccgtcgctgacatcgccaaagtccttatactgctccatgatgtccttgttgccgtcgccgtacacatcgaagaagcgaacggccagcgtggtaaactcagcgcgggtgatggcgtcatcaggggcgaaagtgctgccgctcttgccgtaggtgacgccgttgttgttgaggtacttcacgtagccggagtaccaggcgtgggcggggatgtcggtaaacttggtgttggccgcggtggagatggtgtcgccgttcttatctgccagcaaacgggcgaagatggcggcggcctcgctgcgggtcatgctgcgcgcggggccaaaggtgccgtcagggtaaccgaggatatacacgccgtggcgctcggtttcctccacctcggggacggtcagctcaccgttcttatccgttttaccgctggcggtctggttcagatcgttcttgacggtgatatttttattctcctgcgggaccttcttgttgtcggtgacgacgattgtcacctgatgcttggcatccatatccgtgccatccggcaggatgatcgagatattgccggtcttgccgatggaaacatcgctgccaggaatcggacgcttggtgtccgtgcggataactttaacggtcagggtccagcggttgccgtctgcgtcctcatagccaccggtgaccttgccgtcctcattggtcttgccactgccggtgggaacggtgatctggcccgcggcgtcggtcttaccggaggagtagttatcattcttgtctgtaacggcaatgctcatgcccggtacagcgctcttatccttgacaagctgcacggtgacggtcgtctggtcggcatagtccagcaggcggctattcggcaagcggatggagatgctgttgtctttgcgaagcgtcacggcaacgttcgcgacggggtccttggtgtcggtatcggtgacagtcacgagatagccgcccacgatggcctcgcccctgctgtccgtggtgccgctgttgtagatcttgtcgatctcggcggtttccagcgtctcaccgcagttttcgcattccttgtgcttgctgccctcggagtcggtggtcggctccttgtcgatgacccagtcgcccggcttgtgaccggtaggctcggtgtagtcgcgcttgttgctgtcaccacagcgggtgcaggtgttggtggtgtagcccatctccgtgcaggtaggagccgtcacttcactcttgtaatcgtgaccgagcgcatttttcagcacagcgccgcagtgggtgcagagctggggttccgtgcaggtggcaggattgccgggaatatgaccagcagcctcgttgccttcaatacggtgataaccgcagcggacgcagcggtactccataacgccctcgccggtgcaggtggcgttggtgatgagagtgccttcatcccagctgtggcccagcggagcggtgtagtccgtcacgaagctgctgccgcagccatcgcagcggtggatggtcttgccgccgccctcacaggtcgcggcgatcacatgggattcgtagttatgaggcagaacggaagtgatgtcctcgatatggcggtcgccgcagacggagcactcgcggacggtgtagccggggttcatgcaggtggcggctacgggataggtcttatactgatgctctcccttgggcgtggcggtctgcttcatctggccgcagcgggagcagagctccagcagcttgccatcggtttcgcaggtggcatcgcggatgacgatgctctgccatgcgtggccgagagagttcacatagtcgcgcttttcaatcttgccgcactcggtgcagaggtagcggtcatagccaagggtgatgcagccagccttggtgcggtccagcagaatgaagtggtggttttcgccgcagcccttgtcggagcagcagttgccgccgcagttcttgtcctggcagccgcagttgggatcatcgcagccgcaggtgcatttgccgtcctcgctggcctgggtatcgcgcagccagacatttgccacgccgttttccgtcatgctgacattctgataggtgtaggtgatctcgtaataaaccgtgtactgaccttcctccgtgtaattgggcgcggaggtcatggtgcagctttcggcgctgttgccgtagcggatggaagtgcggacgccagcttcggagaggtcgctgacggtgatcgtgtggggctggccgtccacgacgccgtagtagtctgcaatgaccgccttggctgctgtgtagtcatagctggcgtagtcgcacaggctgcacttctccacggtggcaaagcggccgttggcgggctggggcaggacctcggtctccatgctgtggcgctccagcgtgcggttcacggtgtggttcgtaccgtagcaaaacgcgcagtaggtgccacctttggtggtaacggtatggtaggtatcgtccgtgtactcgtaggtcacggtttcctccagcttctgtgtaaattccgcggcgcagtcaaacagccagtaaacatttttgagatagccgtaatcagacttcggctcgtttgtgttgataccgccgcaggtttcgcagactgccttggtataatgatagccggtataatgggcgtctttgccgggaacaccgtccatgcagtcgcccttgccgacgccgtccatcatggtgccgtctgagtatttgacgttacggctcagagcggtctggccgttgcgggtatactcgggaacgcggaatacctcaaaggacgtcactttgccgcactcgccgcatttgaaggtttcacgggtcacgacgctgttgacgtccagctcattcgtgcggttggacgcctgcatccagtgttcggcggggtcatggtagctgttctgctgggccgcaaaaacgctggggaccaggctgaagcacagtgtcagcgtcaggagcatggccagcgcacggcggaaaattgtatgattcttgttcaagtgcatatttcctccttagatattttgatgggatgttaagtcatgttctgcaatgcttggttatcgccccctctccggagtgtttcttttttgcaggtattcgttccagtcctttccactgcgaggctcttctaccgttacggcatagcctctggccgagtatttgtccttgagctgctgggctgctgcccgtcccggtgcgtctgcgtccaggcaaagcgtgatgcgcttgatgctggggttgtccttcaggtacgtttccagtgcgccgtcatagaggccgcacagcgctactgcattgatcggctcgcggtggagcgagaggtagctcatgaggtcgataggggcctcgaacacgtgcaccagatctaagctgggatctgacggaatggggaagccggtattcttatcgctgcctgtcacatctccgcgaaagcctttgccgtcccggtcgtaggtcccacgcaggcctgcgtacttcgcctgtccggcgtgatcttttccgacgaacacacagttgtgatgctcggcatcctcgtacaacagaccgttgttcataaactgccggatcacctgcgcggcgatgccgcgtttgcgcaggtaggcaaagactctgcggtcatccatgtttcgaggaggcagggcgaagggctttggcggggtgtcctgcttgatggaagacactacttgagcaggggagtctctggcccgcccgttaaagacgagcaggtattcaacagcttccgggaatgtcttgccgcagaactgctgcacgagagtgatggcgtcgccgcccgtgttctgcgagtagcggaaccatgtgcggcggtccttgatccgcagactgtccatttctgctgtggtgtggtaccggccaatgcgtttgacctgatagcccaagtgggtcagcagctccagcagatccgtttccctgacaatttgcatttctgtgtctgtaaagcgtcttttgatttcgcttgccacggcgatttcctcctttctcttgaaacgcaaaaagccggtcatggcacccgagctgttcggatgccatgaccggctttcttctaaatcgtgtttttgctttggcatttgtgcgggcttacacggcgctttcctcgtcaggggtatccgtgtccgcaggggcggtctcgtcggccacacgggcctcgacaggcgtctcagcgggggaatcctgctctgtagcgctctcggcgtccgcttcgtccagtgcctgcgagatcaggcccagcacgaagtcccgctgggtgagttttttgccggtgcggagtgtttcgcgctcgaggtgacgtttgatgcgctggaagagttcttcggggacctggaatgccatggttctgcctttttcagtcatgtgaatgccgcctttctgattttccatcatgttgtaatagtcttggatgaggttggcgatgtactcgctggtggtctggcccaaccgttcccgttcttcactgactcgctcgtggagggcgatgggaatctgagcacataagtttttggtggttgccatttggctgcctccttcgtttgttgtagcgcaatcatacccgaaaggttacgagaaagctattaccaataccaccagggaatgacgcacaaacgaagcagaagcaacataagcaccgaagaagcgaaaaaaggccaccgatctgctccctgtgagggaggagagatcagtggcctatcggtttgcgcttttttatgccctggcgttcgagtcacatcagttcataaaaatgtcctgctgcatctctaaaatgtcgcctgtcgcggagaaaaactcgttgtccgaaaaatcatgtttttctaactttttgaattgaaaagtggcggtaaatatatgaaaacaccgcgcttttgcgcggcgttttctgtgctgcatctttcatcaacacattttggtgcgggcatggggacttgaaccccaacgccttgcggcacgagaacctaaatctcgcatgtctgccaatttcatcatgcccgcatatattttactatatcatatctctttcgcggcggcaaggagaaaattcgttgcaatgcgagcctgtgcgatttataatggaacagcgcgcgatatatgaccgcgcagcaccgatcatgggaggactccaccgtgcagaacgcttatcctgattattacccgctcttccgctgcatcgccggccgctgccgacacaactgctgcatcggctgggagatcgacgtggacggggattccctcgccgcctacgaccggatcggcggcgcgatgggcgagcgcctgcgtaagtgtatcgaccgcggcggcgagataccgcactttattctcgacgagcacgaatgctgtccgtttttgaacggcaaaaacctctgcgacctcattttatacggcggggagggtatgctctgccagatctgcaccgaccacccgcgctaccgcagctttttttcggagcgcacggagattggcattggcctctgctgcgaggaggccgcgcgcctcattttgaccaggccggagaagacaacgctcgtcgtgacgggcgagggggagctcgacgaagaggagacggcgctgctcacgctgcgcgaccgccttttcacccttgcgcaaaaccgtgaggaaccgatcgagcggcgaatggagcagattttatcggcctgcggtgcgcacgtgccggacgtcccgcttgcgcagtgggcagaattttatctctcgctcgagcgcatggacgaggcgtggacaggcattttggaagcgctgcgcgagcacgcagatgagttgccgctcgacgattttgccgcgcacatgaaaggacgcgagacggagtatgagcagctgctcgtctacttcctctatcgtcacgtgccgacggcgctcgacgacggggacgtgagcagcaaggcggcattcgccgtgctgtctgtccggctgcttttcgcactcggtgcgctgcaccttttgctgcacggcgagttcacggtggaggatcagatcgagttctgccggctgtacagcgcggaggtcgagtattccgacgataatatggacgcgctcttcgatgcgctgctataacaaaaatgccgcccgattcgacacggggcggcattttttgcgctttttggttgattcttatgtaaacctgtggtatcataaaaagacattttagagagtgggcgttttcgcccgatcccggcaaaaggagagaaacgagatgaagcagaacatgagaaagagaacgccgctggccgtgcttctggcgctgtgccttgccatgcagctctgcgtgcccgccgcgatggcgagcaatcggctgatgcgcgcgggcgacgcggccatcgcgcagatcgaggaggaagagggcttccgtgcggaaaagtattcctccggcggcaagtggtacatcggttacggcacggagtgcgatgccgaggactatcccgagggcatcacgcgtgaggaggcggagctccttctaatgagtaaggtcgagacctacgaggccaagctcaacgacttttttgaccgctacgacgttacgcccacgcaggggcagttcgacgcgctgatctgcttcagctacaatttcggcaccggttggatgagcggcacgagcgatttggtcaagatcgcccgcggcgaaaaggacgcgacgcgccttgaagtggcgcatgcgttcggcgaatggtgccattccggcggacaggcccaggcgggccttgccgaccgccgcctgcaggaggccgccatttatttggacgacagcacccgcgcggcggaggacgagtttgcgtatctcatcatcaatatggagagcggcgcgtcctatgagacagacttcgccgtctacgagatcggcaagacctacggtagcttccccaaagcggaaaagctcggctacagctttgccggcttccagacgagcgacggcaagaccatcacggaaaacagcatcgtgaacggcaacgcggtcgtcacggcgcagtggacggcgacgagctacaccggcaagacctataccgacgtcaacaagtccgactggttctataactatgtcatggagctgagcgagcagggcatcgtcggcggcaacggcgacggcacgtttgcccccaaccgtcccacgagcacgggcgaaatgctcaagctcgtgctgctctcgaccggccacaaggagcagaaacccagcacggcgcactgggcaagcggctacgcgacctacgcctattccatgggctttgccgcgcagaattacagcgacagccagctcgacaacggcatcagccgcctcgatgtggcgcgctttgcggccaaggcgctgggctacggcgcgtccaacacggcctctccctttgccgacgtgaacgacggctatgtgacggcgctctatgaagcgggtgtgttcatcggcacgaaggtcggcgacctgacgtatttctaccccaacagcagcatcacgcgcgcggaggtggcgacgatcgtttaccgcatctatcagctcagctcgctcgaccagaagcagaagatctactacaaggactacacgctcgatgtgctcgagggcgttccgacgaacagctataataagaacgcgtttgtcaagaacggcagcatcatgacctacaacgatcccagcgtgcgcacgcgtgtcggtatcgacgtgtcgcagtatcagggcgatgtggactggaacgcggtcgcgcgcactgatgtggactttgtcatcgcgcgcgtgggcggccgcggctacactgtgggcgcgatctatgacgacacgaagtttgacgagtatgccgacggcgcggcgagagcgggccttcaggtgggcgcttacttcttctcgcaggctgtgagcgtggcagaggcgcaggaggaggcctatcacgtgctcgacaagctgcgcgaccatgagatcacgggtcccgtcgtcttcgactgggaggtcatcggcaagagcgaggcgcgcacctacggcatcgagaccggcgtgctctgcgctgcggcgaacgccttctgcaagatcatcaaggacgcgggctacgacccaatgatctacatcaccgactacgcgggttatgtcaagtatgacctcagcgaggtcatggattacccgctgtggtacgcgcgctacgatgtggacgcgccctcgttctactacgattttgccatgtggcagtattcatccaagggcagcgtggacggcatcaagggcaacgtcgatatggacatctggttcattaagtgaagaagcaaaagaaaaggcgatggccgtacggccatcgcctttttcgttgcgatttttcttagagctcgatcagctcatactctctcgaatcgaagccgagctcggcggcggcctccacggtgtggacgccgttgaggctctcgatgcgctcaacgaggtggtcgcggcccgaatcgtcggacgcgtagacaaggtcgaggcacgcctggtcgatggcgatggggtcaagggaggcgagaatgccgatatctttcatacacgggtcctccgccacggcgcagcagtcgcagtcgacggacatgttcttcatcacgttgatgtagacgatcttgccgtcgaaaagcttgacgacggactccgccgcgtcggccatggactcaaggaaggcattctgctcggtcgtccacatctcttcgggcttgcccgcgccgtggatgttcgccttgcctgcgctggacgcgcatccgatggagagctgtttgagcgcgccgccgaagccgcccatcgggtggcccttgaagtgggaaagaacgagcatggaatcataatttttgatatccttgccgaccagatttttctggatgcgcttgccgttcgggatggggagctcaagatcgggaccctcggcatcgagaatgtcgacatcgaagagcttgctccagccgtgtttgatcatcgtgcggcggtgggcgtcggtcgtgttgcgctcgccgggataggcggtgttgcactcaacgatggtgccgtgtacggtctcgaccatcggctgccagaattcgggcgtcagaaagttctggttgcccggttcgccggagtgaaccttgacggcgaccttaccgggcagctcgagacccacggccttgtagagctccacgaccttttccggcgtgatctgcttggaaaaataaacctttgctttcatattttgatcctcctgaggcggatagtttactgcttggggcacatctaatgcgaagcgtccctataaaaacagcataaagcaaaagtgcgcgggatgcaaatgaaaaaaatgaatggacacgttttttggctgaattcccgcgcggaggtgtatatttctaaggcgtttgcagaggaaatacttgattttgacgcggggagatactataattatttcctaattgtgatatgactgtttctgatagattgcgaggattagctatggacaaagcaaaaaagaacaccgtcatccatgcggcggctgaccgcatggcggcgaactacaagagctctcagatccccatgtacggcgatgcgctgcgcatgcccaaccgtaatgcggtcatcgagatcatccgcgactgtcagaagctcattttccctgtttactacggcgaccgcgacctcttgaagctgccgccggagcaatacagcgcgcttttgatggagcacatccacgaaaagctgacgcgccagatcacgctgacgatgccggagtgcgacgagaactgcgaagtggcctatgcgatcagcacggcattcatcgagcgcatccctgccattcaagagttgctgctcaaggacctgtcggcgaactttgagggcgatcctgcggcttacagcaaggaggaggtcctgctctcgtaccccggcatgttcgccatcttcatctaccgcatcgcgcacgagctgtatgagaacaaggtcgcgatgatcccgcgcatgatgtcggagtatgcccattcacagaccggtatcgacatcaaccccggcgcgaagatcggcgaatacttcttcatcgaccacggtacgggcgtcgtcgtcggcgagacgacgatcatcggcgacaacgtcaagctctatcagggcgcgacgctcggcgcgctctcgcccgcgggtatggcgacgaacccgaatgtgcgccgccacccgaaggtcggcaacaacgtcgtcatctacgcaaactccacgctgctcggcggtgcgacggagatcggcgacaatgtcgtcgtcggtggcaacgcgtttctgacctcgtcggtcgcgcccaacacggtcgtgagcgtcaaaaatccggagatgacgttccgcggcaagcaccacaggggatgatcctgacggagggggcgcgcgtccgcctgcggatgatgcggcgggaggacgcggacgaattatacgccctgctctcggatgaagcggtgatgcgctggctggagccgccgtttaaccgcgcgcaggccgagcgctttttggagcaggcgggactttccgagccgccgctcatctatgccgcggagaatatggcgggagaatttctcggctacgccatctaccacgactatgacgagtacagccgggagctcggctgggtgctcaagcctgccttttggcacaagggctatgcggacgaaatgacggaccttctgaccgcgcttgcacggcgggaggggaagaatgccgtgatcgaatgcgtccccgaacagacggcgagcgcgcacatcgcgcgcaggcacggcttttcgtatgagggccgcgcggacagctgtgacgtttaccgcctgcgctgtgaaaaataagaaagagggcgcttcccaagctgggaagcgccctctttgtgctgctgttttgctttgcgccgatggatagtggatggaaagcggcagaagagcgcacaaaagccgacggggaggaggacctgccggcttttgtgctacattgagaaaaagagaaaaaagaatggtgacaaattaaaatatgctttacagcagcatgacgcccgcatcctcgcaggtcttgcgcgtggcttcgtcccacagggagacctgtacctcgccgatgtgcgcggtgccgatgagcagcatgcacaggcggctctggccgatgccgccgcccatggtcaggggcaactcgccattcagcagcatcctgtggaaggggagcgcgcggcggtcgtcgcagccggcgatcgtcagctgggagtcgagggacttggggtcgacgcggatacccatggaagagatctcgaacgcatggccgagcacttcgttccagtagaggatatcaccgttgagttcccaatcgtcatagtcgggggcgcggccgtcgtgcttgatgccggattttaagatcttgccgatctgcatcaggaaaacgacgcccttcttcttgcagatctcatcctcgcgctgcttgggtgtcaggtcgggatagaggtcttcgagctcctgcgtggtgatgaagaagacctcactggggagcttggtgtgcagggaggggaaagcgacattcagcgcgctgctcgtctcgctgacggcggagacgatatcgcgcacggtgcgcttgagataagcgacgttgcggtcctcggcggagatgaccttttcccagtcccactggtccacatagatggagtggaggttgtcgacctcttcgtcgcggcggatggcgttcatgtcggtgaacaggcccttgccgaccttgaagtcgtagcgcttgagcgcaagacgcttccacttggccagcgaatgaacgacctgggcattggtgccgacgtcgggaatgtcaaaggagacgggacgctcgacgccgttgaggttgtcgttcagaccagaattttcatccacgaacagcggagcagaaacccggcggagattgagggcattgctcagattgacctgaaaattgctcttgatgaattcgatggcgcgctgcatttcatagacagacagcggggtgtggtagtcctgcggaataaagactttgctcataccggtttcactccttaagaaaaagtatgcgctaattataatcaggcatattaggaaattcaatagtgaaattttaagtagttgagcttgcaaaatgagaaatttttgtcgacatggtcagcaatatggaaaaacttaatccttttgcccgttgcaatctgaaagcacgcgtgatagactgcataatgagataaaatgcagataggaggctcttttgtgagaacactcttgaaaggcgcggacattctgctgcgcaaggaaaacggatatgaaacgctgcacggcgcctatctcggcgtcgatgaggcgaagatcgactatatcggtgaggaaaaacccgaaaaggcctatgaccttgaaaaggacatgagcggcaggctccttgccccgggactcatcaactgccacagccatatcgccatgacgctgatgcgcggcatcggcagcggactgcctttgcaggactggctcttcaaggccattttcccgatcgaggacaagctcgtgcgcgaggatatcgccgcagcgagccgctttgccctgatcgagatgatcgcgggcggcacgacgagcttttccgatatgtactttttccccgaggagaccgtctgggcggtcgaagaggcggggatcaaggcgaacctgaaccgctgtgtgcagtgctttgacgaaaaccagaccgtggagcagaacacgcagatccccgaatcgctcgcgctttttgaaaagtaccacggcgcggcggacgggcgcattcacattgacttttccatccacgcggagtatacctgcaagagccatatcgtcaaggcgtacagcgacctctgccgtgaaaagggcgggcgcatgcacatccacctcgccgagaccgcgcgcgagcagcgcgagtgcatcgagcgctacggcaaaacgccgacggagtggttcgaatcgctcggcacgttcgattcgcccacggcggcggcgcactgcgtcgcggtgacggagcgcgacatggacattctgaaagcccacggcgtcagcgtcgtccacaacccgacgtcgaacttaaagctcggcagcggctttgcccccatccgccagatgatggacaagggcatcaacgtgacgctcggcaccgacggcacggccagcaacaacaatttaaatatgttcgaggagatgcacctcgctgagatcatgcacgacggctatcacaacgacccgacgttgatctccacgcaggaggtgctcgatatggcgacggtcaacggcgcgaaattgcagggccgcgacgacaccggcgtgctggccgtcggcaaaaaggccgacatcattgcgcttgatttaagcaagccccacctctatcccaatttcgacacgcccgcgctcctgacctgctcggcgcaggcgggcgacgtgtgcatgacgatggtggacggcaatattttatatgaaaacggtgaatttaagacgctggacgagaacaaggtgcgcgccgacatggagcgtgccgttgagcgcctttatagaaagtgagagagaagaaacatggagagagcggacaaagacctcgcctttttgctgcgctacgagaatgttgcgtggtttgaagacggcgaggtgcgcatcttggaccggcgcatttaccccgcaaagatcgaatttgtcacctgccgcacacatcaggaggtcgcgcaggccatcaccgacatggtgacgcagagcgcgggcccctacacggcggcgccgatgggcatggcgctcgcggcgtgggaatgccgcggcaaatcggcggacgagcagatggaatacctcaagaaagcggcttacaccatttctcacgcgcgccccacgacgcaaaagcgcatgacgcttctgtgcgacatctgcctgaaagaggccgagcgcgcgctttcagcgggggagaatgtggccgaggccatcaagaataagaccatcgagctcaacaacgtgcgctataacagaatggcgaagatcggctcgtacttagtcgatatgttccccgacaacggaacggtgatgacgcactgcttcgccgagaccatcgtcggcacgatgcttcgtgagtgccgcagccgcggcaaaaacatccggctgttctgtcccgaaacgcgcccgtattttcagggcgcgcgcctgacggcgtccgtctgccacgacatgggctttgacgtgacggtcatctccgacaatatgccggcgttcgtcatgcagaacgaaaaggtcgacgttttcaccaccgcggcggacgccatctgctgcgacggccacgtcgtcaataaggttggcacgttccagaacgccattgtcgccaagtacatgggcatcccgtactttgtcaccggcgcgcccgatcagggacatgagacggtggacagcattcacatcgaaatgcgcgacccgaacttcacgctccaagccatgggcgtgcgcacggcgatggagggcgtgaagggctactatcccgccttcgatatcacgccgccgcatctcgtctcgggcgtcgtgaccgaccttggtatttattctccctacgatctgcaccgctattttacggacggcagcatcggcaaggacaatctggtgatctaaatggaacaaaatctggacattcttcgtcaggagatcgtggacaaatcgcttgaggcgttccgcgagggcctgttttccggcacgagcggcaacatgagctgccgcgtcgcgcccgatgaaatgctcatcacgccgacgtccgtgcgctatgacgtattgcgcgcgcaggacatcgtgtatatgaagctcgacggcacagtgctggagggtgaattgcagccctcgagcgagtggcgcatgcacgcggcggtctacaaggcgtatggcgagacgaacgccgttttccacacgcattcaccctatgccacggcgtttgccgtcgtgcggaaaagcatccccgcggtgttgatcgaatcgtgcatctttttgggcggcgacatccgctgcgcggactacgccgcgccggggaccgagagtgtcggcacgaacgccatccccgcgctcagggaccgcggcggctgcacgctcgccaatcacggcgtgctcgccgtggggaaggaccttgcgcaggcatatctgcgcgcggaatacatcgaagatgtcgccaaggtctacaacttttccaaggtcctcggcacgccggtggagcttgcctctctttaacgagaaaaacagtgcggagaatgcacaaggagaacaaaaatgaaaagcatactgaaaagaaaccgcattctggccgtcattgcactgatcggcctgctcgcttcgttcgtgccgctcatttcgcgcgtgcaggcggaggagagcaacaagtattacgacatcgtcctcgactacaacagcatgcgctcgatggcgcgccagtcctcgcagtcagaggacgagtggatcgatctcttcaagtcgctcggcgtcgacaaggtcgcgctcagcgaggcgagcgccctcaacctgcacgataacgcggccatccccgtccacgcgatgaccgtgaaaaaggcggcggagagctacggatgggaagatcagtaccccgccgaggttgcgcaatggctgcgtgagagcaccgatgtgagcgacgcgatcatctggacggagaccgccgcgagctatgagtggatcctgaacgcctttgaggcccgttttgaggactttgaggccaagacgtatctggagggtgagcacggcttcatcttcatccagcagcagaaaaacggcatgaagggcgaaaagctgctcgacctgcgcctcggcatctggccggacacagtggagctgtttgagcgccacggctaccagatcatcccgcgctctgtgacggaaaagaacatgaacggcacgaaatttgccgaggcctatatcgaagtgctcaagcactacaacgcgccgtactttatgaacaacggcgacgagctcgtcggctatgaggatgacgagagcctcgagcttctgacgcagtatctcaacgagagcggcgcgagcgtcgccatgatggagcagaacgaccagagccagaaccttgtctggcccggcgttgaagaactgctcgacaacacgggctatcgcggtgtgcgcgttttcaacgagtgggcttacatccagaaccgctatcagtactgcggctacgaaggccccgaggagatcacgaacacgttctttagagccatcgccgagcgcaactgcaagatcatcttcctcaagatgatcttagagccggataccgatgtcagctgggacgccgacgagaaggagtgggtctacatcaccgacccggccgactatgagcagatgctcacggacctcgacgcgcgcttggagcccctcggctacacgcacgcgaccgtgcccgcgatggagctgaaagcgccgtccatggcgctcaaggtgctgcagggcatcggcacggcggcgctcatcgtgatcctgcttgatctattcttctttatcggcaagcgctggcgcacgatcctgtttgccgtcggcgcgctcggccttgccggcctcgcggtgctgagaccctcgatgttccgcctgatcctctcgatgtccggaggtatcttgatgccgtcgattgccgctgtcggtctgtgccgcgtactgctcgaaaaaagacgcagcgagccgcagatcaagttcggcaagctgcttggctttacgcttggcacagccatcgcgaccattctgacggcattctgcgggtcgctgctcgcatcgtctgcgctctcgcagctctcgtatattctcgagatcgacctgtaccgcggcgtcaagctcatgcagcttatccccatcgcgctcttcatgctcgcctatcttctggtctacgcctatgaggagaccggcgcgcgcgaggccgtcctcgcccacgcaggacagcgcggggagaagaaccgcgtcaagcgattcaacgcctatttcggcgagctgatgcagacgccgatgaaactcggctggttccttgcgatcgtcgtcatcgcggtggcggcggtgttcatgctgctggtgttcgcctactatatgtaccgcaccggcaactcgaccacgacgtcggcaagggagcttgcgttccgcaacttcctggaaaatacgctcatcgcccgcccgcgcacgaaggaaatgatcgtcggctggccgatgctgatgcttttcatctggtcgctgcgccgcagaatgaagttcctgccgatgatcttcggtacgggcatgaccatcggtcttgtcagcgtggtcaacacgttcctgcacatccgcacgccgtttttgctgagcctgctgcgcaccggctggggcatcctcttcggacttctcatcggcacagccgtggtcattgtggcggagctcatttaccgccttgtgcgcaggatctgcggggtgacgaatggttaacattctgatctcgggctattacggcttcgacaatatcggcgacgagtccatcctgcgcacgctcgtctcgtcgctgcgcgagcacattcccgactgctcgctcacggtgctctcgcacaatcccgcctccacgcgcgaaaaatacggcgtcaaggcggtggaccgcatgtcgccgatggcgattttgcgcgcggtgaaaaagtgcgacatgctcatttccggcggtggcagccttttgcaggatgtgacgagcagcaagagcttacactattacctctccatcatccgctgcgcggaattcttccataaaaaggtcttcatctattcccagggcatcggccccatcgaccgccccggcaaccgccgcgccgcggcggcggcgctcaagcgggcggacggtatcgtcgtgcgcgacgagcggtcggcatcgcttttggaggaaatcggcatcgcgcgcgacaaggttgtcatcacggcggaccccgtcatccgcatgaaaaagcccgatggcgatgtcggcgcggagatcctgcgaaaggcaggcgtctcgctggatggccgtctaactgtcggctgggccatccgtgagcgggacacagacagccgctttgtcaaagagcttttgcgctccatccagatgatgaaggacaagtacaacgcgcagtccgtgctcatcccgttccactatgaagaggacggcgaggtctgccgccatatcgcggcgcaactgcccgatgacacggcggtgtgcctgaatgaaaagtacctctccgaggatatgctctccatcatcggcaacatggacctgctcgtcggcgtgcgcctgcattcgctcatctatgccgccatcatgggcgtgccgctcatcggcatttcgtatgacccaaagtgcacggcgtttttgaattccgtggggctcgacaagctgagcacgaaggagaacttcacggcggagctcttcctgcccgaggccgagcgtgtgctcgaaacgggcaaggagcaggtgcagtgcgtcgaagcgcatatggccaagctttcgcgcaagctcgacacgaacgagaaaatgatctgcgcgatcatggagaaatcgaggaaacataccatgcaagaccctcaaaacaatacggaaaagaaggataaatcgggcgtccgcacggcgggcgcgatcagcttcgtctttctgctgacgctgttcgccaagctcctcggcgtggtgcgcgagatgatgcaggccaacatcttcggcaccggcatcgacgcggacctctacaccgcgtcgtataactcgacgctctatcttttcacgacgatgtgctacgcgctgtgcatcgcggcggtgccgatcctaacgaaggaattcgctgccgaccgcaagcgcggcgagaaagcggccaacaacctgttgaccatcacgctgctcggctcgctcgcggcggtcgttttgtggcagatctttgcctcgacgccgctcgtcggcacgatctgggaccttgacgcggccgagttgccgcgccttgcgagctatatccgcatcatggcctgcgcgctgccggtcgtggcggcggcgtatctgaacgtcgccatcttccaggcgaccgaccactatgaattgcagggcagcatgagcatcccgtacaacgcgttccttgcgatcttccttgtgacgctgggcgcaaagtggggcattaagggcgtcgtcatcgcgagctcgtgcgcgtggctcttacagcttgccatgagcattccatatgcgaagaaggaacattatgtctaccggccgatgctcgaccgcaaggcggactacgtcggaacctacttcaagaccgcgcttgtcacggtgctgacgacgtcgatcttcctgttctgctatctcatcgacacggcgaccgccacggcgctcaacgacagcgccgtcagcgcattctactacgccgacaagctcttcaccccgctcacgacgagcgtgctctacagcatcagcgcggtcatgttcccgcgcttcaaccgcgagttcacgaaggaggactcgaaggggtacctcggctacatctggaacgtgacggaaaacacgctgcttttcatcctgccggtctgcgcgatgatgtgcgcgttcggcacggatatcatccgcgtcatctttgaaagcggcagcttcaccgctgagtcgaccgagatgacgggcagcatcttcgcccgctacgcgctcggcatgagcgctttcgccgtgctcgaccttttgaataaggcttactatgcgatgaaaaagacgctggtgccgctgctcatcaacctcggcgttctggtgctgaatctcattttgaaccgcgtgttctacaccgataccggcgtcgcgctggcaacgtcgcttgcgctgacgatcggcgcgatcgcgatgacgatccagctcttccacggcacgaagatcgtgcgcctggtgccgctcctcaagggcctagccgccacggcggcaatggcggtcgtgctctacggtgggcgttcgcttcttgtcgcggcggatgacagcaagctgatgctcgtcgtcaagtgcggcctgacgggcgttgtggggtgcgttatttacgtgctggtcagcatgattttgaagcagaatatcattgctgatacgattaagaagttcaaaaagtgatactttttgggatttatccccacaccgtgtggggacgcggcaaagggggccattctctcacgtgagagaatggcccccttaaacccccaagagaacgcgaggggagttcccctcgccccccgacattggcagtttgtagcttgaatgactgcacgcgctgcgcaatgtaagtgcggtgtacatggcttcgccatgaatccctgcgattcgtgaccgcttgcaactgcgccttactgtcgtgaggcgcgagtgacgtttgtctggcggcagactgcctgcgaaatgcggctttgctgcgctcgccgcattgtggagactggcggtagacgggaattagtctgcacctctacaagatgggcagagcggcagcgggtagtaggagcagagacaaatcgtatagcaacactaaccgcggcaacgccgcgcgcaggtattcccattctggaggtataagtgtcattcaagcctcagactgccaatcaaaagcctttctcttgggggttcaaagggggcattctcttttgcaaaagagaatggcccctttgtcccgctcccctgcgcggcgcaggggaacaaagtacagcgctgccgcgctgtgatatgttacccttgacgttttttgaaggttaaataaccttcgagcatcaggctcgctgcgacggcgtcgacggttttcttgcgctccttggcgcgcttgccattattcaacagaatattgtgcgcgtcgacggtcgtgcggcgctcgtcccagagcgtgacggggagcgacgtggcctcgcgcagcatcacggcaaagccctcagccttttctgcgcgggggccgcgcgtgccgtccatgttgagcgggtggccgagcacgagctctgtgacctcgtgctcggagatgagcggcagcagcttttcgatgaccacttcgggccggtacgcggtgataacggtcgaaaatccagtgagcgtcagcgtgcggtcggagatcgcgacgccggtgtgcgcgtcgccgtagtcgatggccatgattttcataaaattgcctcctgagcgtttcttttgactgccagcatacaggattttcacccaaaaagcaagcgcggggcagggaagtggcgtgcggaaacggaaaaaatcgcgtcaagagaggcagcaggagagaaaaaacagtggaaagagcgcaaaatctgcgcgattttctgcaaaaacgtgcaaaaagtgcttgacggctggacatgacatgtggtatcatcttacttacctgtgaaagagggctttctttttgcgcgcttttgcttctcggcacgcaagggaaaagcacccctcaaatttgagagcagggaggcaatcgccagcttcgtgccgcttttggcaaacggagctgagtaaataaggaggtgccgttagatgcgcattaagatcacgctcagatgcaacgagtgcaagcagagaaactacaacacgatgaagaacaagaagaacaccccggacaagcttgagctgaacaagtactgccccttctgcaagaagcacaccgtccacaccgaaaccaagtaattaggaaaggctgttgaaacatggcagaagaaaagaagaaaaaggaccgcagcaagtggttccgtgaaatgagaagcgaactgaaaaaggtcgtatggcccaccgcatccaccactgcgaagaacaccggcactgtgctgctgtgctccctcgccgtcggcgcctgcatctggatcttcgactatgtggccgtttccgcagtgcacctgctgatcggtctcgcgggctgacaggagagcagtcatggctgataatgctaagtggtatgttgcgcatacttactccggctatgaaaacgcagtcaagacggccatcgagaagttcgtcgccaaccgtcatctggaggacatgatcctcgacattcaggttccgctggagaccgtcacggaagtgaccgactcgggcgagacgaaggaagtcgaacgcaaggtcttcccgggctacgtgctcgtcaagatgatcatgacggacgacacctggcatctgatccgcaacattcgcggcgtgaccggctttgtcggcacggcgaacaatgaacccattcctctgacggaagaggaagtcctggcgctcggcatggaacggcgagagatcgtcgtgcgctacaatgtcggcgatcaggtcaagatcaccgacggcccgctttcgtccttcctcggcacggtcgaagagatcgacgcagagaagaacaaggtgtgcgtggtcgtgtccatgttcggacgcgaaacgccggtcgagctggagctcgatcaggtcgaggtcgtagaaccgtaatcaccgctaaaagcgatgagccgcgtatgcggcaaacgtgggagagacgttcagtctcgccaagggcggccggaatcgccggtcgttaccacattcaatattaaggaggtgcctctcatggcacagaagatcaccggttacgttaagctgcagatccctgcaggcaaagcaactcccgcaccccccgttggccccgcgctcggtcagcacggcgtcaacatcgctgcgttcaccaaggaattcaacgagcgcaccaagaacgacatgggtctcatcatccccgttgtcatcacggtgtatgccgaccgttccttctccttcgtcaccaagactcctcccgctgccgtcctcatcaagaaggaatgcaacatcgagtctggctccggcgtccccaacaagaccaaggtcgctaccatttccaaggcctctgtccagaagatcgctgagatgaagatgcgtgacctcaacgcgagcactctcgagtccgcgatgagcatgatcgccggtaccgcacgctccatgggcgttgtcgtcgaagaataaggagggtgtgaacaatgtttagaggtaaaaagtatcaggatgctgcaaagcagatcgaaaagaacactcagtatgacgccgcagagggcttcggcctgatctgcaagaccgcttccgcgaagtttgacgagaccgtcgagctgcacgtcaagctgggcgtcgactcccgtcacgctgaccagcaggtccgcggcgccatcgtcctccccaacggcaccggcaagaacgtccgcgttctcgtcttcgccaagggcgacaaggctgaggctgccaaggctgccggcgctgactatgtcggcgagatggacctcgtcgagaagatccagaaggaaaactggttcgacttcgacgtcgtcgtcgcttctcccgacatgatgggtgttgtcggccgtctcggtaaggtgctcggtcctaagggcctgatgccgtccccgaaggccggtaccgtcactcccgacgtcgccaaggctgttcaggagtccaaggccggtaaggtcgagtatcgtctcgacaagaccaacatcatccactgccccatcggtaaggtttccttcggccccgagaagctcgctgagaacttcaacgctctcatgggtgctatcatcaaggccaagcccgccgcttccaagggccagtatatcaagtcctgcgtcgccgcctccaccatgggccccggcgtcaagatgaacaccgcaaagatctaagaaaacttaaagagggggacgctgtcccccctttagattccccctcaccagtttgcgaactggtgtcgccgcgcgatcgcggctgagccgcggtatttttctgacgcgcatgtcgtcagaaaaatcaaattggattatttttgacgcgcatgtcgtcagaaaaatgatttgcgctgtgcgcggcgcaaatatggggtattttgcggaaaaaacgatatttggggttgacaatgctgccaactctggatatactattagagcgttccaaagacagcaggtgaggtttacctcgtaagtcctgccgaggatggcaaacatttattgattgctttaccgtccttatgtcctgcatgaggacggtttcctttttagaacgcctctttcccctggcacgcgaggcgtgccgcaaaatccaatggaggtgaactcaagaaatgcctaacgcaaaagttctgtctgaaaagcaggcgatcgtggcctctctgaccgagaagctgcagggcgcagctgccggcgttatcgttgactacaagggcatcaccgtcgcggaagacaccgagcttcgcgctgagtgccgtaagaacgatgtcgagtatgcagttgtcaagaacaccctgctccgctttgctttcaacaacgtcggcctcaatgagctcgatgatcagctgaacggtaccacgtctcttgccatcgctgccgatcccgtcgcccccgcgcgcgtgatcgccgactttgccaagaagctcaacggtaagttcgagatcaagggcggcttcatggacggcaaggtcgtcgacatggccaccgtcaatgctctggccgcgatccccgcactgcccgtcctgcaggcacaggtgcttggcaccatgctggctcccatttcgggcttggcttgcgtcctcaagcagatcgccgagaagaacggcgctcccgccgaggaagcttccgcagagtaatcgtctgcacccaactcaaaaactaaaacaaatatcttaaaattggaggatcattacaatgagcgagaaagttaccgctatgatcgaagaaatcaagggccttaccgtcctggagctctctgagctcgtccacgctctcgaggaagagttcggcgtttccgccgctgctatggctgctcccgctgccggcggtgctgcccctgctgctgaggagaagaccgagttcgatgtcgtcctcgccggtttcgacgctgctgccaagatcaaggtcatcaaggctgtccgcgagatcgctggcctgggcctggccgaggccaaggctttcgtcgagtctgctccgaaggctctgaaggagggcgtgtccaaggaggatgccgagaacttcaagaagcagctcgaagaggctggcgcgaaggtcgagattaagtaatctcaccctactgcgaggttcaaaaagcccgtgtcgtgagacacgggctttttctttttgactgtcttatggaatagaacatctgttgacataatatatgcgcgtgtacgtcaaaaggacgtgcgcaccgtgggctcggacggggcaacgatgtcgatgatctgattctgtgtgtaaatgccgtagtgcttccacgatgcgggagcgtccgttccatcgggtataagatggacatcaatggcatggggaagatagtcgagcagcttggaccgttcgaacgtgcaaagataggtgccgctgtggacttcgtctgcgtcaaatacgcagtaggattcgttgcgcacctgatagagcaggtaattttcaaagatgagctcgatcttggcgttttcatcggggcacagcggcgtacagtgcgcgagaatgtcgtcgagggcggcatttcctgtggacggagtctgtgcatttggctccgctttagcgcagcagatggtgatgtgcagctcgttttcatcctcctcacacagcgtcaggagaaacggtgcacggcggccggcgtccacaaggcggcctgcttcggcgaatgtggtgcaatgagacgtgggagtcacctcgttttgtaaagtatggaaaatactgctcaccgcatgacggtcaggcagtaaaatgataaccggtttgtctccttgttgttccagaggttagtttcgccgagctcgcgcagatcgtcctcgacgaattcatcgaatcgcacagcagcgcggtgaatgacggggcgttcatcgaacgagtagaagccgccctgccagacgtgccagagctccacgcagggcgcggattcgagggcagagccaatgtagtcgatcagctgccgcgcgcggccctcggtatagtaggcccagtcgaggcagacggcaaaggctttgtcggtatagagaaaactgtctgggtaagtgcgcagcgcgaagttgtcgtccgcgccgccgtcgtcgatcgtaccgtcgtccacattgatggcgaggtagtcgtactccggcggaggaaagacctccggcagcggcgcgtcggaagcgaaaaagatgcaggcgctcatcatgatcctcctgtaatgcctcattttccttttgatacggcgatcatatcataaaagatatgaacaaatctactgcgatgctgttacgagacccttgcgccgcggtgcgggaagaacgcgcgccggtgaggaaaaggctggaacagccataatataaaccgctcgagcgcttgacttttttgtgcagcggcattaaaatgtataaaatataagagcaggattttcatgcgttgtgtatcctgcgtacaaattctgatgagagacaggctgatgcccgcgtgagccgaggaatgcttacgcggttattttttcgcctggatgggagaaaacatgaagaacaccaaaaactttgcgagccgatggggctttattctggcatccgtcggttcagcggtcggcatggcgaacgtctggggctttcccaacaagcttggcagcaacggcggcggggcatttttgctcatttatctgctgtttattttcattttcagctacgtgggtctgcccgcggaattcgccatgggccgccacgcggcgacgggcacgctcggcgcgtatgaaaaggcatggtcgacgcgcggcaagggcgcaggcaaggtaggaggccttcttggctggctgccgctcgcgggctcgctgtgcattgcgttcggctacgcggtcatcgtcacgtacatcttaaaggcactggtggattcgctcgtcggcacgctgatgacggcggacaccgcgtcgtggttcggcacgttctcctccacaccgtattccgtcattccgtaccacatcatcgtggtcgtggggacgctgctgacgctctatttgggcgcgcacagcatcgaaaaaaccaacaagatcatgatgccgctgtttttcatcatctttctgatccttgcggtgcgcgtggcgatgctgccgggcgtaagcgagggctaccgcttcatgttcactccgcgctgggaggcgctcaaggacccgatgatctggatctgggcgatgggacaggcgttcttctccctctccgtcacgggcagcggcatgatcgtgtacggcgcgtacctctcgaaggacgaggacgtcgtcggcgtcgcgcagcacacggcgctgtttgacacgatcgccgccgtcgttgcggcgctcgtcatcatccccgcatgcttctcctacgggctggacgtcggcgcgggcccgagcctgctgttcgttacgttgccgaccattttacaggatatcccgatggggcggctgttcgccatcatcctctaccttgcgatgatcttcgcgggcgtgagctcgctgcagaacatgttcgaggccgtggcggaatcgctgctgcacaagttccccaagctcagccgcacggcggtgctggcgatcctgtgtgtgctgtgcctcggcatcggcattttcatggagcccatcagcaagtggggtccgtggatggaccttgtttccatctatattatccccatcggcgcgacgctcggcgcgatctcgtggttctacgtgatgaaaaaggacgaactgctcgccgccgtgaacaccggcagcaagaaagagcgcggtgcgctgtggtacaacgtgggccgcttcgtctacgtgccgctcgcggtcatcctgtgctgtgtggcgctgttcatgcacgtggcattctgagttccccctgaacaaaaaaggaaaacaatatgaaggcgagcaagaaaatatgcattgcgattctttcggtgctggcattgacagcgtgcgctgtgggaatcatccggagcacgacctttccgctggacccggcgacgctgccggaccatatctgtgatttttacaatatcggcaggccccagcccctctcgccgagtattcgggtgtacgacagtgttgaactcaaaaatactgtgtggtatctcatggagattggcgaggacatagatctgggctatgtcaagctggaacggaatttccttggccgctacaagattgtgcgcctcggctacggcggcgggagcttccgcgacggcgttgtgcgcagcggggagaaagccaactacctctttggcgggagcgatgtgaccggccgcatcgccaaaatcaccatgacgcagaacggcgagacctgcacgatggaaaatgcggagggaaagacgcatttcctgttctgcacagagctttctccacaactcggcgactatgacttcgaccgcagtacgctgcggttttataacaaagacgggaacgacatcaccgcggagtacaatttaaacggtggtggaatcgcgtaaaatcgacataaaaaaggaagtgcctatcgtaagggcacttcctttttaaataaacttgttgacgaatcaacattaatgcgctatgataaacaagcttgttgatttgtcaacaaataggaaaaaggagaattatcaatggaggagcgctttgagacctttaccgtcctgatcacgcgcatcagccgcagcatcaagcgcatcaaggcggacgaaatggcggacttcgaactgaaagggccgcatgtgtcctgcctctactacctctcccagcgagacggtatgacagccgccgagctctgcgagcgctgcgatgaggacaaggcggccatctcccgctcgctggacgacctcgagaaaaacggttacatcacctgcgcaagcggcgcgggcaagcgctataagagcccgctgcgcctgacggagcggggtaaggcggtcggccgcgcgatcggggagaagatcacgcgcatcgtcgaggcggcatctgagggcctgagcgaggccgagcggcagacgatgtaccgcgcgctcgcgctcgtgagcgagaatttggaacggatttatacccataagaagaccgcgggcgacagagccgcccgcgacgaacaataacggaggaaaaacatgagtgttcagatcattgtggattcgacggtcgacatgcccgagcgcatgaagggccgctttcgcatcgtgccgctcacggtgcactttggcgcagaggagtatatcgacggtgtgaccatcgataagcaccgcttttatgagcggcttgtcgagagcgacgagctgccgacgaccagtcaggcgacgcctgcggcgttcgacgcgatcttctccgatgttgcgtcggtgggagacagcgcggtcgtcgtgacgattgcatcgaagttttccggcacgtaccagagtgcctgcatcgccgcggcggagtacggcaacatctacgttgtggacagcaagagcgcggccatcggctcgggcatccttgccgagtacgcgctcgaatgcgcggacaagggcatggatgcgaagaccattgccgaaacgctggagaaaaagcgcgacgaaatttgcctcatcgcgctgctcgacacgctcgaatacctcaaaaagggcgggcgtatctcgaagactgtcgcgtttgcgggcggacttctcaacatcaagccggtcatcaccgtggtcgacggcgagattcaggttatcggtaaggcaagagggtcgaagcagggcaacaacctgctcgtgcagaaaatccacgagagcggtggcatcgacttcgacgagccaatcatcctcggatacagcgggctgagcgattcgtatctcaaaaaatatgtcgaggacagccgcgacatctggcaggacaaggcggactcgctcgactcgacgctcatttgcagcgtgatcggcacgcacactggccccggcgtggtggcggttgcattcttcaaaaagggctgaacctctaaaaaatcagaaacagcaggaagccggcgtgtcgcgccaacttcctgctgttttttcttaaatattctctttgacccagcgattaaaataccaacggcgctttcgaatggcgctggcactcgctgtagcttgacaacagacggcacggcgaattatagtgattctataaaggcatattgatattcagaggctatgtcttgcgtgaaagcggtgctttgtgctggtatcggtttgcccgtgaaacaggttgaatgggaaaaggagaatgcggtatgttctggacggaggagagcatcgcgcttttgcgcgacgcggcggcgatgaaccgctattatgagaccatcgcggagaggatcgcgccgcagctccaagaaaacgcgcacgtctgcgacgcgggctgcggcatcggcgagctgagccttgctctgaagccgtactgccatcatgtcacggcggtggacgcggatgcgctggccatcaaaacgctgaaagcccacctgatagagggcgtcaccgcgcgctgcggcgatatggagacgcttgcgccggagaagtcctacgacgcgatggtgttctgcctctttggccgcacgcaggatacattacgcatcgcgaaaaagcagtgccgcgggagaattttcctcgtcaagcgggactattcgcatcaccgcttcagtgcgggacaggtgagcctcggcgagtacacggcggggagcacggagaatgttctgcgcgaaaaaggtatcccttacaccgtggagcgcttcacggcggagttcggacagccgttccgctcgctcgaggcggcggagcgctttttcgccctctacaaccgcagcgaaagcgaagtactctcgaaagatgaaatcagagcgcgcctgaccgcggggccgtcggcggaatttccctactacctgccgcacaaaaaggcgttgtgcctgttcaccattgagacggcggctatttcgaaggaggaagcagtatgaaacggcattttttgatctgcggggagcgcggcgtcggcaagtcgacgctgatccgccgcctgctggagcatagcacgcgggaggtcggcggctttgtgacaaagcggctgccggtcgcggatgaaaacggcttttttccaatttatctctatcccgcatcgcagagtgagggcgagcggcgcaacgagacggcgaatcttgtcgggacgtgcgacagccgctcgagcatccgccatccggaggtctttgacggccttggcgcgcagctcatcgagtccgcgccggaaggcggcatcattttgatggacgagctcggctttctcgaaaatgacgccagggcgttccagtccgcggtgctgtgcgcactggacggcgacacgccagtgcttgccgcggtcaagccgaaggacacgccgttcctgcgcgccgtgcgcgggcacgaaaacgcagagctcgtcttcattgacgagcagaaccgtgacgcgcttcttgaaaagctcctgccgcacattttgcggtggaatgaagcttgaagcagcaagctcgccgtgcaatagagaagaagttttcaagcgaacacttgtttgactatcaaaaccgtgctataataccgccattgaggaattggcaaaggggagggggacagcacatggaggacttgcttgcgggcttgaaccgcgcgcagcacgaggccgtcacggcgacggaggggtatgtccgcgtcatcgcgggcgcgggctcgggtaagacgcgtgcgctgtcgcaccgctttgcgtatcttgtcaacgagctcggcatcctgccggggaacatcctgtgcgtgacgtttacgaacaagtcagccaacgagatgcgccagcgtatccacgccttgaccggcgacaacgacacgggctatatcaacacgttccacggcttctgtgtctccgttttgcaggaggacagccatgcggtgcagtacccgaagagctttctggtgctggataattccgacatcgacgcgatgctcggcatcatctacgaagagcgcggcctcacactgcgcgacatgacctattccgccgcacgggacatgatcgagatccgaaagctctttaaggagccggagtattacaaggacatgatcacgatgtcgctcgacacgctgcgcgaaaagtacgagcgtgccgacacggcgggggacatcatcttctacggctatctctatcaggagaaaaagtgcttcggcctcgactacaacgacctcatcaagttctcgctctatattttcgagcagcacgaggacatcaggctcaagtggcagcagcggctcgaatacatcatgatcgacgagtttcaggatatcgacgcgctgcaatatgagctgatggaggtgctgtgcggctatcacggcaacctcttcatcgtgggcgacccggaccagacgatctacacctggcgcggcgcgaacgtcaagtatctgctggatttcgacaaggtttttccaaatgtgcagaccatcatgatgatggaaaactaccgttccacgccggagattttggcggcggcgaactcgctgatcgcaaaaaacggccaccgcatcaaaaaggacctgctcccgacgaagccctcgggcgagaaggtcgtctgccactttgccgacacgcaggaggcggaggcgtattggatggtgggcgagatgaagcggctgcatgatcgcggtctgccgctgcgggatatgaccgtcctctaccgcgcgcactatgtgacgcgcgcggtggaagaggcattgatgcacgaaaaaattccctatacgatctactccggcgtgcagtttttcgaccgcatggagatcaaggacgcactttcatatttgcggatgatcgcctatcaggacgatctgtcgttccagcgcattgccaacgcgccgaagcggaacctcggcaagcggcgcatggcctttttacaggagacggcggaaaaagaggggacgagcctctatataacgctcaaaaaccacctcgaagacagcgtgttcagcggcacgaaggcaaagcagttcgtcgatctgatcgagcgcttttcgcactcgtatcagggtcggcccatctctgaggtgctctcggatattctggacaagagcgggtatgaaaaggcgctgcgcaccgagggcagtcaggagcggctggacgatctggccgagctcaagcagtccatctacgaatacgagacgagctgcggcgaggagagcacgatggagcattacctcgcccacatcgcgcttttcagcaacggcgatgtcgccgagcagggcgacaaggtgaagctgatgaccgtccacgcggcgaagggcctcgaattcccgtatgtattcctctgcggcatgaacgagggcattttcccctcgcgcagggtgcgaacgctccccggcatggaggaggagcggcggctcgctttcgttgcgctgacgcgcgcggagaaggggctttacctctccgaggccgacgggtggaattttgacggctcgccgcgctatccctcgcgctttctgctggatatcgaccgcgagcttctgtcgttcacgcacgaggtcgacgagacgcttctgcgtgaagcggcggatgacgtcgcgcggcgagacaagtatctgcgcgaggaggacggcgacggcacgctgcccatcgggcagcgcgtgcgccacgcggtgttcggtgagggaacggtgctggacgtggacctgaacaagggcgcgcacgtcatccagtttgacggcatgggaacgccgcgcagcatttcgctgcgcgcgaagctcgaaaagatcgggccataaatcggttgacagatttattttggagggatttcgacatgagaaagaattttggcgcacagccctggatctattcgtagcccgtgctcatcatcgcaagctatggcgaggacggcacgcccaacgcgatgaacgccgcctggggcggcgtggccgacagcagccgcatcgcaatgtatttgagcggcggccacaagaccgtgaagaacatcttaaagcgcggcgcgttcaccgtgagcaggggcgacgcagagcatgcggcggcctgcgactatgtgggcatcgagtccggcaacagcgtacccgacaaggtggcgcgcgcgggcttccacgtgacgaagagcgagcatgtggacgcgccggtgatcgacgagctctcgctcgcgctcgagtgcaagctcgtgagctacgacgagaagacaagactcctgaccggcgagatcgtgaacgtcagcgtggacgagcgtgcgctcgacgaaaacggcaagctcgctgtcgaaaagctgcacgtcatcacctttgactacgccaaccacggctattatgtcttgggcgagaaggtcgccagcgcgttcgaagacggcaaaaaattcaggtaaatccggcgaaacagaaagcgccgcgtcccgtattttcttcgggacacggcgcttttttgccgtttcggtcaggatttcgaatttgtttgtgcaaaaccgacgcattagtgttaaaatctcgctaaaaaccgtcccttttactactggcacgggcgtggggcaggtggtatagtaaacaggcatgtgttttttaggaggatcaatatgttttctgcctttttttgcagcctgaaacaggaatttgcaggctacaactcgaaaaagctgctcgccgacatgatggcgggcctgacggtctgcgctgtcgcgctgccgctggcattggcattcggcgtttcatccggcgcgagcgcggcgtccgggcttgtcacggccatcatcgcgggcgtggtcatcgccattctcggcggcgcgtcgtaccagatctcgggccccacgggcgcgatgagtgcggtgctcgtcggcatcgtcgcggaatacggcctgcagggtgtgtttttcgcctgcttcgccgcgggtgttctgctgctgcttgcgggcatcttcaagctgggtcgcttaattagctttatcccgatgcccgtcatcatgggcttcacctcgggcatcgccatcatcatcgcgatggggcagatcgacaacttcttcggtacggtgtcggagggcggctcgaacctggaaaagctcgcgtcctacggccgtcttggcttccacccgaacatgcaggcggtgctcatcggccttctcgtcgtgctggtgatggtcttctggccgaaaaaatggggcgcgcgtgtgccgggctcgctcgtcggcatcatccttgcgacgatcgtcgcgacagtcgcgggcatggatcagctcgctgtcgtcggcgacattcccaagacgctcctgctcgccgaccgcctgtcgctcggcggcctgagcttcacgatgctcgaaaacctgatctctcccatcgtgaccattgcggcgctcggcatgatcgagagccttctttgcggcgcgtcggcctcgcgcatgaagggcgaagcgttcaacgccgatcaggagctgatcgcacagggcgtgggtaatattctgctgccgctttttggcggcgtgcccgcgaccgcagccatcgcacgcacgagcgtagcggtcaagtccggccagcagacgcgccttacgagcgtgttccattcgctgttcctgcttgcctcgatgttcctgctcggcggcgtgatggcgcgcctgccgctctcggcgctcgcgggtgtgctgatggtcacggcatggcgcatgaacgactgggagggtatccgctacatcttccgccacaagttcaagtccggtatcagccagtttttgattacgatgctcgcaacggtcgtctttgacctgacggtcgcgatcctgctcggcgtggtatactccgccattttgtacatggcgaagtcgagtcatatccatgtgaatttctccgatatcgacgcgaacaagctgcgctcggtggagggtaagccccccattcttgagacctccggcgtggcgtacatcacgggcgcgctcttcttcggcgcggtggatgagttcaaccaccgcatggcggagatgccacagtacgaccacatcattttgtcgatgcgcggcatgccgagcgtggatgtctcgggcgcgcaggcgatgctcgaactgtgtgagtcgctcaagagccaaggcaagacggtcgcctgctgcggcatgaccgaggcggtgcgcagctactttgaccgcgcgggcatcaccgagcttctcggcgaggagtcctacttctggagcgccgaccaggcgatccttgacctgctggacgcggagatcgtggaataaaagacatagaaaagcacttcccgccagcggcgggaagtgctttttgctgtacatgggctgcgaaagattttatttgcgccggtcaccctcgcgtgcgatcttgtcgagcgattcctgccggacagcctgacgaagcgccgtcaggtagggcgaaaaggcaacgttctgctcgccgtaggtgagctggaggtcgtattcgtggtcctcccaggtcgaaatgtcggactcgttgtgggagatcacggcctcgagcttgtcgagcgccttgtagatttgggcctcctgcgtttcaagtgcggccatctcgtcgtagagtgcgcgcatctcctcgcggcagggggagggaagcgatgcgacccactggtagagcagcgcttcctccgtcgattcgtcctgtgcggtcttttcaaaggcggggatatcgcccgtgaagcactcgccgaggtcgtggatgaggcacatgcgcgtcaccttgtccatgtcggcctcgggaaattcatcgcgcaggaaaaacgccatcagtgcgatgcgccagctgtgctcggcaacgctctcgtgccgcccgccggaggtgtagcagtggcgggtggtgtccttcaatttttccgccgtgtgcagcgcggcgagcagttcgcttggtctcatgcgtctcctccattgtcgttttctggtattttaccagaggcggaaacgacttgcaaggaaaagaaagaagagagatttccgttcccagcggcatatgatatcatgaatgtgagaaaatttggcgcccggtgaaacaaaacgggcgcggaatgcgtctaaataagcagaagcaagaagatttgagagagaccctcccatgcggagggcggagaggagaatttatgaagcttgcggcggattttcggcaggcggcgcgcgaggcgctgcgcggcaagtggcccattgccattctgatcggccttgtggcggtgctgctcggcggcgcagagagcggcggtccggaggtcaaattcaattacgatgtgtcctcgggcgtgtcgacgacgtttggctacggcggacagacgatttactccacaggctacggtttggacccgaagtggagcggactgctcgtcggcggtgcggtctatctcatcgtgatcgcgctcgtgttggcggcggcgtacttcatcctcggcagcatcgtgagcgtggggtatgccaaatataacctcggccttgtcgaccgcacggagccgggctttgaggcgctgttcgcctatcttccgaactggaagacgacgacgctgacgcggctttggaagggcctctatattctgctggggacgatcctgctcgtcattccgggactgattatgggctacacctacgcgatgacggactacattttggccgagcacccggacatggcgccgggcgaggtgatgaaaacctcgaaggcgatgatggagggcaaccgctggcggctgttctgcctgcaattcagtttcatcggctggatgctcctcagctcgctgacgttcggccttggcaaccttgcgctgcgcccctatcaggaggcggcatacgccgcgttctaccgcgaggtatcgctcgggtaaaaagatagagagaaacaaaacgcgccccgcggatgatccgcggggcgtatttttgctgtgatggaaagcttactttgcgctgtcgtttgcgagggcctggtcgatcagcttctggagcgctgccatgttgtcctcattgtcgatgccgccgagcatcgcctcaccgacgatggcgccgctgcggtcgatgacataggtggtcgggaaggccatgatgtcacccgcaaagtcgccggctgcgctgtcggaggggaagtagatgttctggtagcttgcgcccttggattcaagcagactcttggccgtgctgatcgcatcggcgttgccgtcgagcgtatcgacgttgatgccgacgaccgcgccgccctgcttcttgagcgtttcattgagggcattcagctcaccaagctccgccacgcagggcttgcagccgctgaaccagaagttcacgaccgtcacggcgttctgggagaaaatgctgttgtccacatcgttgccgtcaaggtccttgccggtgaaggcggggaaggccgggacggaatcgttcatgccgccgtcttcaccgtcgcccgcgggctggagggcggcatactgctcctgcaggggctggatttggtcttcaaggtcacggatctgctcggagccttcagtcagcgtcttgagttcgtcctcggtgaactgatccttcacaaggtcgagggcggcaagcaggtaagcgccgtagttcgattcatcggggatctcgtcgcgcttttcgttcatggcggcgaagagcttctgccacagctcaaggttctcttccatgatggcgttttccttgtcggcgagctcctggatctgggcgtagatctcctcggcggtcgcgccctgcgcatcgccatcgcccttgccgtcgcccttgctgccgcaggcggcgagggaaagcgtcagcgtaaaggcgagcagcagcgtaatgatcttcttaaaattcatggtttattctcctttgttttcttcaatgatcggtttttgagacaatttggaacatgctccgccgctgccgaaggcgtagcggaagcggacggcctccgtcgggcaggcggtcacgcatttgccgcagcggatacattcgctgtggttcggcgttttggtcacatccacgtccatggggcaggtccttgcgcacttgccgcaggagacgcatttgttctcgtcaacgtgcatcgacagcagcgacacgcggttgaagagtgcgtagaacgcgccgagcgggcagagccacttgcagaacgggcggtagaagacgacgctcagcacgacgactgttgcgagcacgcaaagcttccacgagaaaagcttgccgagcgcggcgcggatgctgctgttgacaagcgagagcgggatggcgccttccagaacgccctgcgggcagagatatttgcagaagaacgggtcgcccatgcccgcttcgttcaccacaagcaccggcagcaaaaagaccatcaccaccagaatgacatatttaaggtaggtcagcggctttaagcgcttggtggagaactttttggtcgggatcttgtgcagcagctcctgaaaccagccgaacgggcagaggaagccgcagatgaagcggcccagcagcacgccaagcaggatgaggatgccggtgatgtaataggagaagctgaatttggacgagccgacgacggcttggaacgagccgatgggacacgcgcctgccgcgccggggcaggagtagcagttcagccccggcacgcacacggtcttgcccgcgccgcgatagagcgtacccttgaggaagttcggcaggtgcagattcgtcagcagcgccgcgcaggcctgaaccagtccgcgccagcgggcgagcagaaaggaaaacggttttttcttatccaatgcccacacactccagacatagtttgatcgccttgttcagcacgacgcccatctcgccgcgagatgcgccgtagacgaggaatgccgcgctgagcagcaggagcagtacctgcgccgcggcctttttactcagttgcttacgcaaaaaatcaccctttctgtttgcgctgtggcatagcctacacgagggaagtgaatgcattatgaacgtggtgctaagaaaatcttaagatttttccgagaggaattccacaaggtgaggttccaaaaaatcgaggaacgtccgcgcggcgggggagaggtccggcagcgtcgccgcgccgatctcgacgatctgcggcgggtcgagcggcaggatgcgcacgccgcccgaccaagcgcggccattgagcgcgttgttcatggcgaggccgagaccggcctcgaccatcgagtaggtcgcaagggaatccatcgtggaaaattggagattcggcgtgatgccgcagcgcgcgaaaacgcacgcgttgtcgatgtccttgtcgggataggtctcgatgtacggctctttggcgaacgccgcgaccggcagcgcgggcagccatgccatcggatgcgcagcgggaacccaggccgtcagctcatcgtagccgatggggagccagtcgtgcccaccctcgcgcgcggagatgaagcacagatcgagttggtgcgcgttgagctgtgtgatcagctctgtgctgtacccaccgcgcagctgcacctgaatgccgccgtagcgcgcgtggaaatccgatataatgcgcgcgagcggcgaatagaacgcgctgtatgccgtgccgacggtaaccgtgccgacatccagcccgcgcagctgcgcggagagctgggcgcagctctcgcccgcgtgcagtaggtcgcggatggcgggcagcagcttttcgcactcctttgtcgggcgaacgccgctgtgctcgcgcagcaggagcggaacgcccgtctcctcctcaagcgccgcgaccatgcggctcacgccggagggcgtgtattgcagcgcctccgcggcggcggacagacttccggtctcaatggcgcagacgagcgcgcggtagcgatcgagttccatggcggtctcctttgcgaaattgtcaaagatggtttgatggatcatcggtttacgcaaagtatagcgcgggggtatgctgttgtcaaatccttggaaatgggggaaactatggcacgctcttacgatttgacgagcggcagcatcccgcagcatttgctgcgtctggccgcgccgctcatcatgggcaatattttgcagcagctctacaatacggtggacgcatttatcctcggccgcttcgcgggggagctggagtttgccgccgtcggcgtcgcgggctcggtgatgaaccttttcctctttatgatcacaggcgcgtgcacgggcatttccgtcatcttcgcccagctctacggtgcgggtgagcgcgagcgcttccgccgcgagcactggctctcgctctcgtgcgggctgctggtgacgctcgcgtgcagcggcctcggctttttgctgctctcgccgctgctgtggctcatccagaggccaagcgagctcaagacctttgtctcggtgtatctgacgatcattttggcgagcctgcccgcggcgtttctctacaacctctacggcgcgctgctgcgtgccatcgggcgggcgaacgcggcgctgatggcgctcgccgcggcggtgacggtcagtgtcgcgctcgactactgctttgttgcgcgctttcagttgggcatcacgggcgcggcgtgggagacggcggcgtcgcaggccatttcggcggtgctgtgcatcctctacctgcggcgcaaggcaccggagctcatttttgcccgcgcggactgccgtatggatggagagctattgaagcagacggcgcattttagcttcgtcacggcgctgcaccagtcgagcctgtacatcggaaagctcctggtgcagggcgcggtcaacaccggtggcacggacatgatctcggcctacacggcgacgacgcgcatcgagggctttgccaactcgtttggcgacagcggcagcgctgcgacctccgtgctcgtggcatagaatcggggagcagggaaagaagagcgcgtgaaggaatcgtttcgcagcagcctttttctgatgcttgcgatggggcttgcgatgtcgctcatcatgtacgttagcgcgagcacgtcggtcggctttatgctcgggacgcgcagcggcgcggcatttgagaatgcgcgcgactatctgaagctcgtggcgcttttctacacgctctgcttcaccggcaacacattcgctggctattttaacggcatcggaaaggtgtccgtcccgttcctcggtgcgacgagccacatcgcgctgcgagtcgtcctctcgtggttgctggtcggcaaaatgggcctccccgccgtcgcgctggcaacaggcctcggctgggtgctggtcaacgcgctgtggacctttgtcaaatggaggatggagacaaagcagaaagcagcagaacgtgatattatgtaaacatcaaaagccgcgcgcctaagggcgcgcggcttttgataagttttgtgaggtatcgccgctgatcgaaatgcgcggcaaagggatgacatttttgagaaagcacgaggtttttgcccatatgggaagaccatgtcgaaagagaaaaacttttgtaagagacgcgctctgcttgctgaacttctataaagtgaaaccattttacaattcttcgaaatggtagcgcggcttgccggcgcttttcttgccatattcgatggctcttgtcgggcaatagcagatgcaggccatgcactgtgtgcagttggttccccagacgggacgggcgttttgcagtgtgatgttattcagcgggcagagcttttcgcatttgccgcagccgatgcaggcatcacttgcagtaaagggatttgccttcacaaacagcggatagaaaaccgggttcaccgcgctgctcgcgatgcggtcgtagagttttttgcgcggcggtgagaacatgtgtcctgcgcggatcgcggcgatcgcgcggtcgatgaacggctcggctttggcgacgatccggcgcgcctcctcgacggttggtgcgttgaacatggcgatgaaattctccggcatgacgatctgcgccgtgcccatgtagacgaggcccttttcgcggcagagcgcgcggttgtacttcgcggcgttgccgatctcgctgccgcagtccatgacgaaccacgtttccctcgcgccgcgcagctctgttcgcagcagatggtcgcgcacgatgcgcgggatgcgccaggcgtaggtcggcatgacgaggacgagccgtccgttgacggcgagcggtgttatgtcgcctgatttgatgcggtcattcaggctgatgagcgtatcgttcagcgcgtgtgcgatgcgctcggcgatgtggcggctgttgccggtgccggtgaaatagagtaccatggcgacctcctgtgtctttgctcgagcactgcccgaatattgtattgcctctattgtaccagccgtggcgcgagcagacaagcgctttgtgtaggaaaaccggcgaagtaaagggacttgaacctgagaaaaaaatcaccgcggcttttctttatttaccgaaaggggcgaaagagacatattgcctctcgtatacttgtgtttcctgcattttctgcttgcagaatgggggcggatatggtatcttgaaccatgtgcccgtcggctgttttcgaccggcggttcatattctctaactgaacgaccaccgaaaggcagggctttttcttatgatgatcaacaaacggctcatcggcgcggtgccggagagcaaaaaatatatcgcgggcaacgtcgcgctgcaatggtgctcgctgtgcgcgaacatcgcgatgatgagcgccgtgacggcgctgctcgccgcgctgttcgcgggcagcatgacgcagagtacgctgagcagtcctgcaaccactttatcgccttcaagctgctcgcgctgatccgcgacaaggtcttccgcgcactgcgccgtctctgccccgcgaagctcgaggggcgcgaccgcggcaacctcatctccgtcatcacgtcggacattgagctgctcgaggtcttctacgcgcacacgatctcgcccgcggtcatcgcggcgctgttcacgctcatcatgtgtctgttcatcgggcattatcacgcgttgctcggcctttgggcactcgcggcttacgtctgcgtcggcgtggtcatcccgctcatcacgtcccgccgctcgggcgatacggggatgcgattccgcacggagtcgggcgcgctgtcggccttcgtgctcgacagtctgcgcggcctgaacgagaccatccagtatgattgcggtgctgcccgccgcgccgagatggacgagcggctcgagaggtccatctcgacgggcgtgacatcgaagcctgcctcgttcatcgttttggcgatagcctgcgcattctctaattacttgtcgcctacaacgattttcatacccgcgcccatgcggcgggcgatggccgtgccgatctgtccggcaccggcccataacatgacgtctttcatcgttttcctccttacagcagcgccttgacactctgcgcccaggcgttgatcttgctttccggcgtttccagatggtcgccgccattcgaatcgaatttcacctgcatatcacaggcgaagtccgcgccggggcaggcggccttcatatccttgatgacgcggcccggccagccgccgtttgtcataaacggcacaacggtcttgcctgcaaaattctgtccatgcaggaatgtcttgacggcgggagccatcgtgtaccaccacgtcggcgtgccgacggcgatgacgtcgtagtcggcgacgttgatgggaagcggcttgtgctttggctcaaagcccgcgttcacctcgtgctggccctgatcgaccacatcgttgtagttgccggtatacggcacggcggtgtcgagcctcacaagatcgccgccggcgacgctctgcaacgcttttgcggtgcgctcggtgttgccgcacgaccaggagtagtaaacgatcaggagctttttcattttgcgaactcctcaacccactgggcaagcgcgctcttcgcctcgtccacgtggctgccgtggatggcgaggcccttcgtgaccgccgcgccatgggcagccttgcggatgtcgttttcggtatcggaaaggccgctgccctcgtgcgtgcagaaggggtggatggtcttgcccgtgaagtcgtagtgctcgaggaaggtgtagaccgccatcggcatcgtactgcaatagttggggtagccgaggcaaatttcatcataggcgtcgaggtcatcgggcagatccaacaccgcgggacgggcgtttttctgccagtcctcacgcgcctgcgccacacaggtcttgtagtcgtctgaatagggctcggcctgctcaattttgtacagctcgccgccggtcagatccgcgagcatctcagcaaccttttcggtgttgccgacggaaatgcggcggtacgtgccgccgaagtagttctctcccgcgcgggagtaaaatgcgatcaatgctgccattgtttcgctcctttcttatcgctttgcgccaaaagcggcgcatggtttttgttgataccaccattgtaaaccgccgcgccgcgggtatcaattccggttttgcggctttcctataagaaaaactgatatgaaaaaaggcggagccatcggctccgcctttctgctttcgttcaggtatcaaattgtcctttgagcagccgtgcgaattccggcacgtaggggttcacgttctcctttttccagaacgcgcagtatgtgcgaagaagcggctcaccgtttcgcacgagcggcacacgggtgagcggttcggctgcctgcctttcgccgccctccagcggaagaaatcccctgctgcccgcgaccagaaggcgcgccacctccagattctcggcatacaggaattcgctcggaaaagcgagtacaatgcggctgaattcctgctccgcctcccgctccggcggcggggcgatcagaatgcaggggaaattcttgagctctgccggtgcgaccgccttcatctgcgcgattgggctgtgggcggagacttcaatcagggcgggccgggctgcaaggatcagattttcgtaggcgtcggaaaacaagcggcgctgatcgttgagcgtgatctcgacccgatcctcgctcagcatgtcgcacagctccccatggctgccgtacgcgatggagacgctgacgtcgggatacctcgccgaaaaggctgcgagcgcgcggtggaactctccccctgcataggtgcgcaggtagccaatcttcagattcgccaccttgcccttggcgatcttcgccgcctcggcgcacatgcggtcgcagtccgctgtgagcagcaggctcttacggtaaaagtattcgcccgcaggcgtaagagaaaacgagcggtttctgcgcacgagcagcgcaaagcccagctacgctccaaggactgcacctgctgggagatggctgactgcgagatgaaattttcctccgccacggcggaaaagctcccgagacgcacgacggattgaaagtatttgagctgcttgagcatgatgcacctcctgatgtctaaatgacgatcccctcgcagtggtcgagctcgtgctggatgatctccgccgtccagccggtgaaggtcttgaggcgtgtttggaatttttcgttctgccactggactttgacggtctggaagcgctttgccttgcgcgtgccggtgagggacaggcagccctcctcggtgtcgtaggggccggactttttgacgatgacggggttgaacatgagcatgtattcgccgtcattttcaaaagcgatgatgcgcttgttgacgccgatcatgttcgccgccatgccgacgcagccgtccttgtgggcgattagcgtgtcgagaaggtcctgcgcggtgttgagatcgtccgccgtggcggcttcggccctctgggcgaggaaggtctcgtctttgcagatctcacggatcatggtgttcctcctgcgcggcattctgctgcttgtaatttgtgccccagacgaccatggaatcgaggatgggctttaggctgtagccggtctcggtcagcgtgtattccacgcgcggcggtacctcggcgtagaccttgcgggtgagcaggcccttggcctccatatcgcgcagctgcgcggtcagcaccttctgcgtcacatggccgatggactttttaagttcaccgaagcgcttggtgccgtccatcaggtcgcgcaggatgagcaccttccatttgtcgccgatgagcatgagcgtcgtctcgacggggcaggcgggtaattccatggtatgacctccttcgtgttacagatattgaccggtgatgctgtcggggttcaattgaatttcctccggcgtgccggaggcgacgatcctgccgccggcctcaccgccgccggggcccatgtcgatgagaaagtccgcgttgcggatgacgtcgaggtcgtgctcgatgaccacgaccgttgcgccgttgtccaaaagcgcctggaagacgccgagcagcacgcgaacatccagcggatgcaggccgatcgacggttcatcgaagacgaagacagagtcggtctgcgtgcggccgatctcgctggcgagctttaatcgctgtgcctcgccgccggacagactcggcgtttcctcgccgagcgtcaggtagccgaggccgagctgcttcaaaatgccgagcttctggctgacggtcttccggtccgcgcagaattcaatggcggagttgacgtccgtgtccatgagttcaggaagcgaggcgttttcgcccgccttgttcgtgagcttcacgccataggcggctcttgcgtagcgcgagccgcggcagtcggggcagggaatgttgacgtcgggcagaaactgcacgtcgagacttacaacgcccgtgccgtcgcagccgagacagcggagagagccggtgttgtaggaaaaatcgctcgctttatagccgtgttccttcgcgtcgggcgacttggcgtagagcttgcgcagctcgtcgtggacgcccgcgtaggttgcgaccgtggagcggacgttgatgccgatgggcgtcgcgtcgatgagcttgacatgcgcgatgccgtcggcttcgaccgagcgaatgtgcgcgggaagagcgttgccattgatgtttgcctccagcgcggggacaaggctctcgagcaccattgtcgtcttgccggagccggacacgccggtgacgaccgtgaggcggcctttggggatgtcgacctcaagcggcttgaccgtgtggatctgagaagtagacagatgaaccgtgccgtttgcgaacagttcgtcctttttggcgcgctcgcgcagctttgtttcagccttgccggagaggaacggcccaatctgcgaattcgggttttcttcgatcattgggatgttcccctcggcgatgacatggccgcccttagcgcccgcttcggggcccatttcgacgatccagttggcctctttcaagatctgtgtgtcgtggtcgaccaagatgacggagttgccgtcggcgacgagatcgtgcatcacgccggtaagccccacgatgttcgacggatgcagaccgatcgacggctcgtcgagcacatagaggacgccagtcgtgcggttgcgcacggcgcgggcgagctgcatgcgctgccgctcgccggtggagagagtggaggccgagcggtcgagcgtcaggtagccgaggcccaagtcgatgagccgctttgccgtgctctcaaacgcctcgcagatgctctccgccatcggacgcatctcctcaggaagactttccggtacgccgcgcacccagtcgacaaggtccgagagcgtcattgcgcaggcctcgtcgagcgaaatgccgcgcagcttcggcgcgcgggcggcagaagagagacgcgtgccgtggcagtcggggcaggtttcttccttgaggaatttttcgacgcgcttcatgcccttttcgtccttaaccttggcgagtgcgttttcgacggtatagacggcgttgaagtaggtgaagtccagctcgcccgcctggttggaattcttgttgtggtagaagatctgcttcttctccgcggggccgtggaagacgatgtccttttcgtttttggtcaggtcgcggaacggtacatccgtgcgcacgcccatctggcggcagatgtcggtcatcagcgaccacatcaggctgttccacggcgcgaccgcgccgccgtcgatggtcagggaatcgtctggcacgagcgtgtctaagtcgacggtgcggacgatgcctgtgccgctgcattttgggcaggcaccctgtgagttgaacgccagctcctcggcggacggcgcgtagaaatgcgcgccgcactcgggacagacgagctccttgcccgccgcaacgagcagggaaggtgggacgtagtgcccgttcgggcagcggtggctggctaaacgcgagaacatcagacgcaggctgttgagtagctctgtgcccgtgccgaatgtgctgcggatgccgggcacgccggggcgctggtgcagcgccagcgcggcgggaacatacagaacctcatccacgctcgccttggacgcctgcgtcatgcggcggcgcgtgtaggtggacagcgcttcgaggtagcgacgcgagccctcggcatacagcacgccgagcgccagcgaggattttcctgagccggacacgcccgcgatgccgacgatcttaccgagtgggatgtcgacgtcgatatttttgagattgtggacctttgccccacgaatgagcattttgtcgatcatggtatcactccatcagctgtgaaaaaagtgttgaaaatatacaatagtatccttttggtaactacgccacaatattgtgcttactttacgaaagatctttacagcgctatgataaggccaacgaaagaaaaatgcaacctttcgagtgaaaaattattttggaggtatttaccatggacaagactgctgaccgtaccgtagcgctggacaagggccgcgtggacgtctatactaaaaacggtgtcaccctttacgcctatcagacctgcgatttgatcgacgacgaggtcttcgtgctggcgaagaatggccgcggcgtcgtgatcgagctgccgtgcttttttgacaacatccgcgagctgacggatttcctcaagaacgagggtgtcacggtggaggcgaagtttgtcgcctatcacgccgcgggcgcgtctttcctgccggaggtccccgcctacggcacggcttcctccgtcgcctacaatacgacgggcggcggtgcaggtctggtcgcaaactttaagaacgcgttcggcgacagcttcgatcccgccatctgcgaggtggatcacgtgctggaggagggcgagattgagcttgcgggtatccgctttgtcgtgaagcccaatgccgaggcgtttgaccttgaaattccggagatcaactgcgtttacacgcacatgatgggtcacgcctgccactccattgtggcgggttgcccgcacgcagacggcatcatttcccagctcaactactacatccgcaagggctttgaccttgtcctgaccgcgcattacgcgccggaggatctgaaggatgcacagaccaaggtggactacctgacgaacctcaaggagatcgcgctggagagcgaaagcgccgacgagatgaaggccaaggtgcaggaacagtatcctgattacagcggaatgaactatcttgacatgacggtgggctttttcttcccaaataagtaaaacgccctgagaaaggagcaaaacatgacgcaggcggagcggcggctgtacctgatccggtcgctattgaacgaaaaaacggaataccaaagcctgaacgtgccgcgggacgcgggggagcagcgtaagctgctgcgctcgctgatgaatgtccgcatgccgaaggcgacggacgaagcgtttctgcgcgtgcaggacgagtacttgcagcaagagctgacagacgagggcattaccgacctcgacaatctgcggccagtcagtggtgacctttacctctggcagggggacatcacgcgcctcaagtgcggggccatcgtcaacgccgcgaacagcggcatgacgggctgctacatcccgtgccacgcctgcatcgataactgcatccacacctttgccggcgtgcagctgcgtcaggactgcgccgcgctgatggcagagcaggggcacgaggagccaacagggcaggcgaagatcacgaaggcctacaacctgccgtgcgattacgtcctccacacggtcggcccgatcgtctcgggccgcgtgacaagagaggacgagcggctgcttgcgacatgttaccgatcctgtctggaacttgcggagaaaaacagtgtgcgaagcatcgcgttctgctgcatttcgaccggtgtgttccattttccaaacgagcgcgcggcggagatcgccgtggagaccgtgcggcgctataaggtggagacgggcagtaaaataaaggtgggtttcaatgttttcaaggatctcgacaaaacgatctacgagcggcttctcggcgcaaattgcgtgcctgcggcgcgcgcttgacgaggcggatgctgtcgtcatcggcgcgggcgcagggctgtccaccgcggcgggcttcacgtacaatggtgagcggttcaagcggtatttttcggattttgcggaaaaatacggcttccacgacatgtacagcggtgggttctattcgtttccgtcgcaggaggagttctgggcctattggagccggtatatcttcatcaaccgctatcgaaacgcgccgaaaagcgtgcacgaggttctgctcgagctggtgcgggacaaggactattttgtcatcacgacgaacgtcgaccactgcttccagaaggcgggctttgacaaaaagcatcttttctacacgcagggcgactacggcctgtttcagtgcagtgagccgtgctgtcaggagacgtttgacaacgagaaaaccgtccgcgcgatggtcgaagcgcagggcttcaccgtggcggacggcgtgctgacaccgccgacagatgggacgccaacgatggcggtaccgtcggagctccttccgggctgcccgcactgcggcagaccgatgacgatgaacctgcgctgcgacgacaaatttgccgaggacgagggctggcacgccgcggcggagcggtacgaaaatttcctccgcacgcgggacggacaaaagctcctctttttagagctcggcgtcggctacaacacgccggtcatcatcaaatatccgttcctccgcatgacggcgggcaacccgaaggccacctacgcctgcatcaacatggggcaggcaagcacactgcgcgagatcgaagaacggtcgattttgatcgacggggatatcgccgcggtgatagaagaaatgaagaaaaccgcttcctacaaatagcaggaagcggttttaacttatgatgacagcggatttgtgatttaagtactgcgtgcgattttgggaaaatccggtgacgattgtgatacaattcacgattcggcgaagtcagaattcaatgtgatagtttaattcagtcctgttttcacgttgaacttcactgctgatcgttgcggtaccactacattttagttgctacagaataccgtcgagttttgcagcaactttttctgacatacctgcggaagaactgcattgaaagtggtagtccttgctttgttaattgcggtgaacagacctttcatggtgtcggacctacttgatgtggttttctcagatgtgccgcccataggattatcctccgtatctgcctgattaaaaagatgcgtcgcgttttacagaatcataaaatgctacacttaccaacggatattttaatatattatatcaaattgtgcgcatgcacgcaagcaaaatgaggacacaatagacaaaaactgatatttttaataggcgcaaatagatttgacatggactgtacagtaccctctgttttgttgctttttacgatggaatatgctatcttgattacggtaatttactataaatattaggagagtgaacaccgtgctttttgtttgttaccccaagtgcaccacctgccagaaggcgagaaagtggctggacgagcagaggatcgcctatgagctccgcgacatcaaaacggagaatcctacttatggcgagttgaccgcgtggtacgagcggagcggtctgccgctgaaaaagtttttcaacaccagcggccttctgtataagtccatggaactcaaggacaagctgccccaaatgagcgaggacgagatgctgcgcctccttgccacggacggcatgcttgtcaagcgcccgctgctggtcggcgatgacttcgtcctcgttgggttcaaggaaagcgagtgggcggcgcgggtgaagaacgaatgatggccgctgattggcttttgctttattttgtatggctgccttgaagagcttattccgagcattgaaacgtatatacggatataaagatgtctaaaatcagtcggtttcaaagatcttagggcaagcacatggttcgaacattcgacatcttggtcccaaacttatcgggaatactttttccactcgtttatagcggttttcggcgctttttaatttgttttacttactctttgacgctcttatctccgttgtttccgagtgttccggagccgtatgtggtaatctatgtggtcaaaaacgcttcccgccccaaaccggtgattttttcaccggcccaggacgggaagcgtttctcattgctgttggctgcattgtaactctgaggagggtgttatgcaagtggtttctgcgagaggtgagacagaagttgagttgctatagataagaaaagtgaagctaattttcggagtgattatagaaagcactttcaactactaacttatattcatcatggatcttatctgcagtagctgtaatcataaatccagctttgtacccaaagccacaaaagttatctgtcaggattcttaagcgctccttgtctgatgaaagatcgcagcgcttgtaggctttcttcatttcaatacaaaaaagattatcaaaccctctctgctcgtcatagccccgcttatgtacaattaaatctacaacaatattatgaccgtttaacactttagcggcgtgctcattcccgcggcttccacggttatattctacatctactacatactcgcaaaattcagattctgcaatagcacgttcgagatatgaagcaaacttagcgcaaatacaccgttcgcttaaatctctggatatcaaatactgctcattttgattaaaactttgaagggcggagtttaagcatgctgtgacgctgttttgtgtttctgtcattgctaattacctccatcataggtgttgtaagatttttccatgttaagtgactgatgattaggcgagatattcctgtggagttatatggggcaaaatttgcaccgctatagacaaagaatagcatcacgccttcgccttttgaagatagaactcactctccgcaacccgcgtcacaaaatcatactccagccgtgttgcctttgaaggcgaaatattgtagcgattaaacaccgagcgaaaatatgcaaagaactctctgtcttcctctgtcatcaaggcaacccagccgttctcggcaccatgagattcaatttcctctaacgctgccatacgctctttatccatgtcagttgctcctttcggtgaactttcgcctacactcagcgggaatcgttttggattacctgaattgtaactctaatggtaggggtgtgcaagtggtttctgcaagggtggcagctcagcagttgcggcgctatagacaaagaagaatgagtttacagcatgaaaataatcgcaggcacttttccactatctgagtataaatcccttaattcaggcataatagtaagggatttaagacgcagcccattgactattcccttgttttatattattatttaagggaaagagaaagggggtaagggaatgagaaccttcaattactccgcaatcaaggagcaaaagtgggactcggatgttcttggcctgattgcagccatatacaaggaagctggaaagcaggaattgtatttgaaacagcgcccggaggagctcgaaaagctcgtggagattgccaagatacagagcactgaggcatcgaatgccatcgagggcatcgtcaccacgagtacacgaatccggcagctcgtcgaggagaaaaccactccgcggaaccgggatgagcaggagatcgctggataccgcgatgtgctgagtatcattcatgagagctttgacgcgataccaattacgcagaactatatcctgcagcttcataaaatcctgtacagccacatgaataacccgcttgcgggccgcacaaaaagcgtgcagaattatatcactgcaacctatccggacggtcatgtggaaacgctgttcacgccgcttgccccttatgaaacgccggaagcgcttgacagaatctgcgaggaatacaaccgtgtgattggaaatatggaactggaaccgttgattacaatctcggttttcatccatgactttttgtgcatccaccctttcaatgacgggaacgggagaatgagccggctactcacgacgctgcttctgtaccgaaacggtttttatgttggaaagtacatctcccttgaagctaaaatcgccaaaaacaaggatctgtactacgatgcgcttgcacaggcgcaaaccggctggcacgaaggtgctgaggatgtagtgccattcatcaagtacctgctcggaacgatccttgcggcctataaggactttgaggatcgcgtggcgcttgtagaaaccaagctgtccgcactggaaatggtgcgcagagcaagcaagaatagaatcgggcggttcaataagcaggatatccgggagctttgcccgacgctcagcgacagctccattgagggtgctctgcggaagctggttgcagccggagaattgaaaaaagaaggtcgtgggaagaatacctgctatttcaggctgaattagatatccttcaataaaaataacattttagaagaccgtacctgttcatatgagcaggtacggtctttttgataaaagtagcgaagttagcatcccaataggcagaaaaattgttgtcacacaattgcttttcttggagaaatacaaaacttttagtcgctgttaccatatgactgccgctgcacgatgcaatgtactaagagattgagtgtctcttcagctgttgatcgtttcagttcacattcccaaactacaatcacattccatccgagcttggcgaggagggcgtgatttttagcatcgcgctcaatgttggagcctattttctttttccaaaattccgcattattcttaggccacacaaaatagtgacaaccttcatgcccatgccagaaacaaccgtttacaaagatcacagtcttatatttgggaagaacaatatccggttttcctggaagccgagcgtcattttttctgtatcggaatccttgagaaaacaagtattttctgacaagttcttctggtttagtatcctttccacgaatacgggacatattatagcttctggtttccggagaatggacatcggccataacaatcccccatttcaattagtctttgtagtagtctttcagtttttgacgacatattctcgtaatcgcggctttattggatatgtcaatcgtgctccagatgtccggagaagcaaaaaatacatgcgagtcttcgttataaaagaaaaagccgctctctattaatgcctttacggggttagaaagaagatttgcgattatttgtgcatcggtcacatcgtctctcagatatatacactgtttcttctcaattgccagtccttgtgctttcctatttgaatagtattcacgaaaatagactgcagcattttcaatagaaatacagccatcccggtcaccatagtgaagtagtgccagaattaaaattggtttgtaagaatatgacattctcatagttttacaataatcaagcaaacaggaaagcttttcaacttgactcactgtcggactatagcgagaagacctggtatgttcattttcttttccggaagtagatgttgcccggccaatagcggacgcaatgctttcgatacgatgtattgccgaagaattaccctcgacataaaagtctctgacagcaagctttaacttatctttcaacacgtctatcgagtcttgatgcacaggctcagaagatagctgaataccagcggcttttaatatataatcgtaggcttcttgggacaacgggcgaatagaactttgccaaggaggattgaggctctttcgaactgtttcgaaaccaagttgttcaatatatccaccgtcagggagataaattggaaccttccgttcaaactgttggcaatccagaagtttagcatagtagttttctccatctgtagtctgaatttcgccaacagagcctactccaaaataataccgttgactcttgtcgtatcgattgccttggtaataaatgaaaatatctcctttgtgcagttgatttttatacctggcgggataatggtatgagctgaacagttcatctgtgtaggaagactcactatccaccttttgagacaggataacaagcatacaatcacctcactgatccagtaattcagcaaaaaatccaatggatttgttatccagcgtgccaacgactgtgccgcgatccagcagcctgttgccgcattcgcaacaggtttccggcaacagcgcacagttatggcatgctgccaagttacaggattccggaccttgtccgtaagactgaatgcaaactgggtccgaagaacaccatgcggcattccgtactgcatcacggatcgtatcctctatatgatcctttgcaccttggcgaaccaagccgccgagggaaccttcagaatcaccggaagctgtgtaaataaggacaccgtacataccatacttattttctgctttttcacagtaaattctttcccgaatagaggaactgccatagccacattcaaagctgagctggttgatgatcaggtgggcaaaagtatgaatcaaaacgaattccgggcgaagatctccggtgacatttgcaccaaactttgagttccggtaagaatcctgaaggttacgcagtcgtgccaagacagcaggccgttgcgcccattcttccaccgcttccttgttgaattcaaagaaaataccttcgccatgaacctgaatagctgggagccagttttcactgcccagtctaagcattttctttcgctcagagataggcatctcactgggttccgcacgtgagaatccaacgaaagcacgggtctcctgaagcttatgtacaagggaaatgctcttgaagtatttgctgatgactggatcgtagtaggaaatcggataattctttgaatggaagcgctgtgcatcgccgccactggattttatcagcacattgtactctgcaagccgatactcgtcttcagatatttcttctgtaacatccggtaacccttccaacccctgatcccggcgaataaatgcattgtaaagagcttcccggtcaacatgtttagcatctgccaacatataaataaagcttcggtccaattcgccgttaacccgacgtgcacttactgaatcaaaaaactcatccagtacagcgagaattttctttgttgcctgttcatcatcggttggaatgtaaatggaacttctggtatcagcaaaccatacattcgtagcaccccggagaaccactcgtacatcggcacggccacaaggatgctcttcatcgctgtccataccaagccatggcttagtacctttgcatctgtatccaatcttggataatgctccgggcttagtagcaccagcaatgttttttcttgcaccgcaggtacactcataatacacaccactcagagaagcagatgaaccaccggtacttcttctgattttgcaggtctccggattataccggtatccggggtcctgatgaagccattcagctactgggaaatcatcaatatgaccatccgggcagataacaatgaaacgttccggaatcagtttccttctgtgtcggaacgcaggattacaccttcttccgttaggccatggatagcactcacattcaggttgctgctggtagaatgtagttttttccattgtgccgcagaatgggcaatagtgccatgtagggaatcttaccgtcggaattttcagaaaacagttctgtggatcggcattattctcccgataatcagggggccaacgcagttcctgaacacccagccgtcgaagcagacgctcatcctttattacgaaaggtgtcgcatcattgtagcgccacatatccagaccggcaatcatcagggattcatcgttggggaatggaacgatcgctcccacaccccatggaccaatcagggcacttctgcgcataggtctgttattaaatgccattttttagccctcctttggtacatagcgattggtaagtacttcggcctcgcaggatgcatctacgctgcgcatggaagtgggagtctcaattccccgggagccccatgcttcattgggatggcttcctgcggaatacattaagggaacagggtcagcgtaagaacagtcagggtttctcgcaggctcccatttccggggattccagtcctcccaacactgcagaatatactccattcgatccagtgttgcatccagttcttcactgtcgatatcctctacacggttttcaatgacacagcgtactttatcaatcaaatcatcatcagggaaacggggcggatcctcattgaatctgtcgtcactttccaaccgcatcattccaaccataattgcgtgcaaagcacgctcgcgcaccggagcagagaagggtgtgacgcttgtcggttcaacgttgcaatatacgcgggagtgataggacctgaattgttcatagtgggacttgtcccttggacggccgggccggtacaaaacaaaaacaagaccaggagcattttctgcatcacgtccaacgcggctggttgcctgaatatattcagatgtggttttgggctgtccagccacggtcatcagaccaagtctggatacatccaagccaacggaaatcatgtttgtggcaaggcaaatatcgatgggatgttccttgattttcccttcagaatccacttcgccgggatatcgaattcccagatttgccaggctggcagttacttcgctgccggagatacgactggtaagttcctcatcccgccaaatgtatcgtctgttcttgcggtactcttcttttgttggataccgcttgtcttcgaaccgacgcttatacataacgtccagatgttgatcgatatccgcccgaatccaagtggctgcctgtccaagttcacgaatactgttatagtaacctatattggtccagtagggatcacgatccttttccgagtcaacccgcatcgctttggcaccatacagcaacgatgcaaacaggcggattgcggtagttgcatcggacgaagagcccgtagccaatatgcctacatagcgccgaccattttgattacgtttttcctctgcaaagaaagagtttcctgcatcgaggccagaggggggaaattggaaaacatcatcctggtcacagccgtacagagcgtggcattgttcttttgcacggctgatcgttgctgtggacgcaataatctttggatgaatatcgccggatgctgttcttgtggtacaaagttcgtgaatcagtgtttcatagtggcctaccatggaacccaaagggccagaaatcagatgcaactcgtcctgaataataagatccggagaagtcttctttaccccgttttcataaccgaatattttctgcgcattcgggcggaacggaagcattgcgaacttatccacggtacccagcagcaatgtgggagtctctttataaatagattcatccacaacaaacagcggcagatcctcggtcgagaagtcgcattgatgattacgacaccggaaagcaaaaccaaaccttctccggcccagcggtactttcctgtaaccgggaagttcccactgattcttgcccttttgtacaggccccatttgtgcaccacaccacgggcatttcagcataacaaaaggattgctaccttctccacgatacagcttttcatacgcttttactgcaccgcttactttgttgggagtagtggaaataccaacccacaaaccaatggtaattctgttcttgccgaacaagtcttcatgactctttcggatgaggtcgcaggcgcatatcatagcggatgcacgctcatactgctgtgcagtcaaaaggcgaagtgtataccgcatcagaatagcagtacctttgtcatccttgttcataaggcggcggataaagatggtatatgcagaaagacccagatatgcttcggttttaccgccaccggtgggaaaccagatcagatcgacgattccgcgctcattacagtcacggtcgtacatggcgcgaagattcatcaacacaaatgccagctgaaagggacgccatttgccataaacccgctgttctttgttgtgccaagtactacagggaccgcgttacctatttgcttataagcaagtgttcgcgaaggtcgtccagttacggattcaaaaaagtagttgtctggaaatgtttgaatgcgagcagcttctcttggggtaatagaacgattttgcttaatgtccggatgaataaagtagtgcccatctctcgaaatatgtgccacgacggtctgggcatagggtagatttccagccactactttaaaacgatccaagaaactttttgtgttattatgggtacgtaatcgttcaggaaggtctgtatatgagactctggttttgcttttattccaagtatcgacaacaatgcggtatatctcaagatcttgtgcagtattgggccgtgcttgatgaaatgtcactggctccccatcatactctttaattcttgcgctgaacaggtacttcccagtatagtgagttgttttcaccggagtaataacaccctctccagccttgatggagggaagatcgcaaaataattctccgactttgtgtgcatctttgaccacagggatttgaggataaaaatctgctttttcgccatggaaaccgatcaaaataattctctttctgttttgaagcacaccgtaatctgatgcgttcaatatacgaaagtccgttgcatatccgcatttcttgaataatgcgcgcatgttgtcaaaatgcaaggagccatcctcatctctggcggacagtaagcccaaaacattttcaaatacgaaatattttggctgatattttttcaaaaactctgcatatagcctgtatagataattccgcttatcaccgaccattttgcattcagaccgggatcttccagcaatagagtaagcttggcaaggagggccacctacaatcagatcaagtttttcaccgccaagtagtgagtcaatgtctttaaaaatggcaggtaaagactcctctgatatctcataattaagaactgagtccaatatttccttaggaaccagagcatagaaatctttccggggaatatctccggccaaatatttggtatatggcgcaagattatttccctttttgagccaatgatatgccgtgcgtgttcttaaggtatagcacgcagcagcatccatttccacgtgagcaatcggttcatagccagctctgataaatccttcggacaagccccctgctcccgcaaataaatcaagatatttaggcatggtataatcacctcgttttttattagcgacagggagtcacttatcctctggtataaactccataatgtcctcaatccgacaatccagagcagtgcaaatctttaggagaatctctgttgtcacatgaccgtttttccccatctttgttacggaagcggaactgataccagccttagcacataaatctttcttcttcatgtccttgtcgatcaataatttccagagctttttataactgacagccataaagcttgttcctccgaatcaaagaaaaaatgccccgccaactggcagagcatttttatctgcatttatccgccacggcatatatccaacaccgatggcgttgtatattatcatatcagaaacaatgtagaaattcaagaaaaaatgatgaattcgcatgatttttgccaaagatactcatcattgatattagagggagctttttagtgctaacaaatgctttcgtccatgattgatcttacttttacgacaatcacagattgagaaagaaatggatggcacgtgggtatggctaacttgggagcccacaccacgagtaccccacatccccaaatagcggctgagacgcattgtttcagctgctatttttctaaaaagtttcagtagctgtttccgccgaactgtggtatatgtttgtgctgcaaggaggcgagtgcatgaaatacaagctgctgaaagacctatatgactgcttttataccccatctgaactcccggcgcagaaacaggaaattgagaaatgctaccaagcacttagtgaggtgctcggcaaaccggagcgtcggctggtactccagatcatcgacgcaaaagaccgtattgcggaggatacctccatcgacagctttatcgccggatttgagctggcgtggaagctgtccatagaactgaatcactacgaaaacgagcgctcagtctcctgccgaacggcaatgggattgggagctcgtttcgcatctaagggggaagagaaatgaagaagttcgtcatagcaaccatgattgcagcctgtgttgccctgtgtgccgctgtgtggccacatggcaacgcggtcgaggaaacacccgtcccagccgctgaaaccgctgtgagcgccaaggaagcgaccgttgcggaaattgaggaacgcgcagcactggcagagaaggaaaaaggaacgattccgcgacaagaatcgccccaagaagagcaacctgaaccggagatagggcctattgaaatacccacagcttccgaactccagccttccacggggcagacacctactaaaaatcccgtgccagagcagactccgccccaggcacccaaagaactgcagcccggcgataaagtttatgtggcgggctttggctgggtggagtacgaggggcccaatcattgtgaagacggcgcggatatttacgaaaacggcaacaaaattgggatcatggggtgaaatgtgtagttacccattgcattcgcttcccattcatgttatcatgatagcgctaaattgttggactgtcctgaactttgatcgttcgtagcatgagagtacgaatcatattgaacggcagagacatagacaattttgcagacaaatgagtaaatcctcgaaactatcgattccaatcaaattctcattatggaattgagaaagcagtttgctggttgactgtcgttgtccccctgttgtttcgatgctttgcaccacaaaatcgaaccgaagaaagtgttctttcatcggctttgttttgttgcgtgcaaagcggtcttccggatgatcgcagtccacgcacgaagcaaagtgcgtggacttttttcggctcagaaaggaggccaattatgggaaaggtatcaggaaaaacacataccaaagaacagctggatcactgggcaaatctgcataatcccaataacaaggcatatcgagctgacgctgacaatcgtgccaatcagatgaatccaaaccacagaacgcaccagagaactcacaatgcaaaccgcagaaacaaagcacattggatgcccctgtgggcaccggactatccggaatacgatgattaaaaattagaggtgtacggtatgtcaaagcactttttcgactacgatgacggtgacttcgccatgagcatttctgacagcatggcgatggactccgatgggaatctcatgatgcgcatgggagatcacatggcgatggacatggacaccggggatattcacatgatctcctcgtggtctgatgatgacgaggagtagagcataggcagcagctcaacggttgagccgccatagacaaggaaaacactctcaatccgggcagagaaagcagcgggacaggccgtaaaggcttgtcccgctgcctgcgtgttagggcagatattcttccgtgatccgataccggctgatgccgaaggcgttgctccgctccatgatctccgccgggatcttgggcaggtacttcttgctgaagctggtgtccccgaagtaggcgtcaaagcttgccaccggcaggacgacccattcgcaatcatcctgccggttggcgaggcaatagcggatcagcgtacagacaacctcggatggaatttccttcgggagcgctgttgttactttctctgtcagttcaagcggcagctccggctcctctctgcgcagcggccccagctccaacgcatcggcaaggacatcgtcaaagcgcagcgtccatgcgcctttggtttgggacgcaaaaatcgggatctgatactgcatcaccttacttcgccatgcggcggcaaacttggactgaataacctccgcatacttgagtgaggtgctgcgcaccttttccgggtgcgtcagcatgaagtccgccgcgcggagaacatgacggaggaaccagccgaccccatccgcatccaccagctccgggaactctgtatgcagctccgaaaaatccgtctggaactgccactccttgtcctgcacacgctttccgtcctctggcacactgcaccaggcgcagagcgcacggcgggcatggtcgacccggtcatgcggatcacccgaaatgactgctccatctttgctgtggaacaggtatccgcgagccagaacagtcaaaatccgcgccatcccctcaaactccaggatcgtggcaaatgtgaaccggcccagccatgtcgtatcgctcttcttgctggcggtataggaaaccgttctggtatatgcgcagaattctacccattcgttaatcatcccgcacctccagaacatttttctcgatatactccggcagcagctcccacagcaggtcgcgtctgccgagggccaccacatagcgcacggccagagccggtcttacaatcgcggtcagcagctcccggcacttggccgtcaccgcgtcacggtagctccgggaggcggacttgtccgcgaaggctctcatcatggcggtgaaggcttccgagtcgctttcacggaacagctgctttttctccctgccggtgttctcgtcctccatatcacagacaatgtctcccaggatgcggtagccaccgaagcggaaatcggtcagcagatcgtaaatatcctcaaactccggctccgtcagccattcccgcaggaagcactcccgtgcatcctcgtccatgaggtgccatgcttgctcccgcatggcatacagcagggcggacaccttttccggcggcaggctgccgaacagagcatacagctcgtcaggatcgtatgcatcctcctgccctctggcatacagaatgcgctccacatcgctcttccgctttttctccttcaccggaacgcggcaggcccggatgcgggagagacaggcgccgtaatcccgcagcagcgcgtccaccgccgccagcttatcggaattcagatgctccttccagtccggctgccgggcaaaggaaaacagttcctcgtccctggcgggcttcgttttgatgcgcggtgtgttctttttcagctgctgtgccagatacggcaggcgctccacgttggagtccaccttgctccaatccaccttcttgaaaaacgccttcaccttggccgcatgggtaggctcataccaggcacgccgggtctccatttcttctaccaacgttttatatttgagaaagtcgctgcgcctgacggtcttatggatcaggtactcatccagatccgggcggatgccgctcttggccgagtcgatctccagcccggtgaggatggccaatgtctccgtctcctcccggcagcgctcacgctcctcgacgtcggagttttcgttgtaggcaatgatgctgcggtccagcgcggcgttgcagatctggccgacgcgggaggagaaggtactgcgaaccgtttcaaagcgggcctcccagtcgtcggcattgcggatctgtggctgggccgtggggatcatcagcagcggcaggttgtgtgatctggaaaatacgctccgcggccgcggaggatcgtgatagatgtttcgcttcacgcattcgttcaaaatgggatcgctgatcgtcttgatcatatcgccgtcgtagtcggcaccgcccaaacgctccgcggcgagtgaagtgtagccaaccataacaacatccgtcagatggccgagatactgatcgcgtagatttttactgtcttcaagaggataaagctgcatttcttcattccgggcaatgtgtggattgcgcagcagcgtgcagacatgaccggactggtaagccgcgcccggagcaaagaaattctgatggttcaactccagcccccagcgaaaattgataaaggtattcgtttttttacttgttccggttttcgtaacaggcaggcagttcagaaaatccagcagatctccggaaagataacggttgtctcctgctacgatcagccggccgacggcgtactgctctgcgattttatcggcttcggcctccagccgcttggcataaatcggttcgttgatgaaacgaggattctttttcagcacggcggcaaggatctggtctttgccctgatgccgttcccaccagctgacccgctcaaacttctccagaaaataattctgccgaaacgattcgtcggcacagaagctgtaatacgccagttccgtctgcttggtgagccaatttcgctcgtccgtctccgggctgtgatcccagccgtccggcagatcggcggggcggaactcgtccgccttgagtgacactgtgttcaaaaactgatagttcagttctgtcgttttctccggcttttccttgctgacattcgtgatgtacagcgcatggcggtacttgcggaacaccgcccagtagtcctcccagctcatgccgcttccgttcagccagccgtagcccttgaacatacttttggtgaggatgatatcgaccttctggatcggatgctccacgccccacagatcggtgatggtgtccgtcccgcagagggtcaggaagtctttgaagtccacctcgtgcagcatacccttgacatagggcatacgaatttgaaatgaggtgtggactttctttccgcacagcttctcgtcaataaggcgggcatattgtttggagatcaggccctcgccgtcgaagcaggtgacctcgacatcggccatcgtttccacccggtgatatttgcgggtgctgttctgcgtcccgtcgtcctccacagtgatcacctctgtgggtgggggcgttcgtaccggattgtcaacgaccactacccggtggggctggtcaatgccgatgccgtcaatgcggataccgctggacagcatcagaccgttgtaggcgtagagcttgctgagctggcagtcaccgatggtcatatccatcatgatgcggcggcgcacggcatcataaaaatcctcccggatgaaggacagccgtgcctgtcggctcatgctgcccgaacgctcaaaggcgaggtagcgatgcgggccggggccaaaatccaggctcacgccctcggggcggaacagggacttggtcttcttctgccggatcaggtttttctttctggcaccgctccggtcaaagatgccggagaagtccatatagaaaatgatgtccgagaggtcagtcaccagctgcctgccgggaactccggtgaaggcgtcgccgtgcagcacgcacatgatctgatagaacagcgcgttatcgtcctgctcgtgaggtgcggaaagtgatttgcatttctctgtctcagcggcgctgagatggaaagtatatgcaccgtcctgctgccttccatagctgatcacggctctggcggacagctcgtagattctatatttcaccaatggcatcggctcacctcctgatgcttctattctatcatgaggttctaaatttgcaatatggatactgctcccactttttcagtgggagctttttgcttgcagctctcaacaaaaaattacaaaggaggaattcaatgcaagaatccacattcaccaactatgaccagctgccgctgttcctcaatgcgaacgcggtggcgcaggtgctgggcgtgtccatctccagcgcctatgagctcatgcacgaaacgggcttcccagccctgcggatcggaaaccgcatcgtggtacccaaagaaaaattccgtcggtgggtcgatgcgcagacaggaggtgatgcctgatgttccagcgctggcctaagcgggatccgaacaagcactactatctcgtcccaaacgaagtcttcaatctcggtctcacttctcacgagatcgccgtctacaattaccttctccgctgcgaggaccgcaggacctaccagtgtcatcccagctaccgcaccatcggtcgggcggtgcggttgagcgaaaacactgtgcggaagtatgtgaccggtttggaggagaagggactcatccgcaccgagcccagcaccatcatcacgaaggacggccgcgtgcgcaacggaagtctcatctacaccatccgccccattcaggaagcgctggagctgaactatcagcggcagttcctgcgggcggagcgtgacatggagcgggcaaaggcagagaaacggctggccgaattgagtcggcaaaacaagaaggaggaaagcgcatgatgcagcagcttgcaaactttatcgtagaccatgacccactgatggtcctacggcgcacacacgacacggtgcgttacattcggtgggtgtggaacaaggatcatgccgaccccattgatgaagaagaacttcgcctgttcctctgcgatgaacattacggtgatctgaccgatgagcaaaagaccgttgcccgtcggtgccgggacgggatgcgaagtgtctatgcggagctgtgcgtgcgcttgctgcaaagtgagatcatgctggagcagggcatggtgccggacagcagcacctactgcagtgtgttctgcccggaagggggtgatgcgccgtggatgattgaccgggcaggataaccgaaaatcagaccgatttgccgccgacgaaagaaaagcaggagaaagccccgacgcctattcgcgccggggcacccccacaaatgcccgcagtgcgggcattttcaagggtttgtgaccggggacaatgcgacgctctttccgggctcatggacccactctgacgctgaaaatccgaaaaagtcagtgtttgcaagggcttctaccgacgtcataccggccccaatccccattttaccccgatttcaggccaatttgcggttaaagttgatagaagaatacagtagctatttccgcaaaagtgtggtagttgtttgtgttgcaaaaagaaaatgaattcaaaggaagtgaaatacatggcaaaacgaagaccggccggtgacggcatggtgcgaaagcgtgatgacggacgctgggaaggccgcatcgttatcggccacaaggaaaacggcgagccgctgttccggcatgtgtatgccaagacccaaaaggcactgctggacaagctccaccagaacatcgagtgctaccgcgatgtggagctgaccgaggacagtcggatgacgctgggccagtggctggatcgctggctcacggagtacaaggcgggtacggtgcggcccggtaccctcgagggctaccgccgctacatcgaatactacatcaagccgcagctgggcgacaagcagatctcccttctctcccagcaggacatccagcggatgtaccgccgtctgaaaacggaggggcgcatccacgaacatcccgagatgaaccatcagctttccgactccatggttcgccacatccattccacgctccacgccgcgctgaaagatgcggtgcaggcgcatgtcattcccagaaaccctaccgaggggacaacggctcccaagcccaactacaaacccaagcgcatcctcacccgtgcggagctggacgcctttctcgcagtggtggagcaggacgaggtgtggcgagacttcttccaaacggaactgatgaccggcctgcgccgcggcgagatctgcggtctgcaatggagcgacttcgatggggacaccgggacgctgaaggtgtgccgcaccctccacagccagcggaagggcgagtacaccgttggtgagacaaagaccaatcaaggtatgcgcactattattctgccgcacagcgtgactgaaatcctgcggcggcgcaaagagaatgccatcagtcaatggatattccctgacccggtgaagccggaggatcccgccgatcccaatgcggcgtatcgccacatgaaaacgctcctccagcgggcggggctgcccagcatccgcttccacgatctgcgccacaccttcgccacccatgcccttaccagcggcgtggacgccaagacactgtccggaattctgggacacaccaatgcgtccttcacgctggacacctatacccatgtcacatcggatatgcagaagacagcctctggcatcgtgggcggcttcatggaggacatcttcggaaaggagttgaaaccgtggcaagaaagcgaaaagccggagacggaaccgtaagacagcgcaaagatgggcgctgggaggggcgcatcgtcatcggctatgacgataacggctatcccaagacgaaaaatgtcctcgccaaaaccaagaaggagtgccttgaaaaactccaaaatctcaaggaggaatgcggtggacggaagccggagaaggtgcggtcagagatgcccttcggggtctggctgacatattggtacgaaaatcattccaagcccaaaattcgccccaccacgcaggagacctacgaaagccgcatccgtctgcacatcatcccggagattggggacattccactgaacaagctgacgcagaatgacttgcagcagttctatggccgactcaagaaaagcggccggaagcgcttcaccgacaagtacggcgaagggctgtccgaccgaatggtgcgtatgtgtcacgccacctgccgctccgcattggagaaggcggtgcaggatgggctgatccgtatgaacccggccatcggctgcaagctgccgccgaaaaaggctcgggagatgcaggtgctgacgcgggaggaactgcagcggtttctcatccaggcaaagttcgagggttactacgaagtctttcttctggacttggccaccggcctgcgccgaggcgagctcatggcgctgcaatgggacgacctgaactttaaaaccggcgtgctgaatgtgaacaagcaggtctacgatgtgcggggccagcttcaaatcagcacgcccaagacgaagaactctgtccgcaaaatcgtcctgccgcccgccgtggtggcggtgttgcgggagtacaaaaagacggtggactcccgctggatgttcccgtccccagtgaaggaggactgccccatcacccctggcgtggtgcgccgcagactacagctcatcttggaacacgcagggtgcaagcatgtgcgcttccatgacttgcgccataccttcgcaacgctggcgctggagaacggcatggatgtcaagaccctctctgccatgctggggcatgtgtcagcagctaccacgctggatatctatactcacatcaccgacgatatgcaacgcacggccgccgccaacatcgaccgcggcatcggcaaagcagcgccgcaggaggacgcttcagagccggggcaggaaactgccccggcccaggcggaaaagccgagtatgaccgacttcaagccctatgcgggccgcaagcgcaagtcaggcaccggttgcgtcagccagatcaacgaccacctgtttgaaggccgctattctcctaaatggcccgatggcaaaaagcacgcccgcaatgtctatgcccatacccgcgaggagtgcgaggagaagctgaaggtgttgattgaggagacgaaagccgaactggtagagctgaagcggcaaaaagcggagggggctcttcctccacaggagctggagaagggtaagaagagaggtgggaaggtaaggaaagcgagcaaataacagtagacaccgagcgaggtaccaaatgatcggtacctcattcggtgcttattgtttcatggtaaaacaatagggaatcactgtttttgttattgcggtgaaatgcggacacaaaacgaggagttgacttattgtgtgaattgaatataattatagtggggtggtttaatgaacttgctacatgtgttcgcaaccaatcttaagtgctatcgtaacgaaaaaggtttatcacaaagagagtttgcggatttagcaggattgcatcgtacatatattagtgccgttgaacgagaacgccgaagcattgccctttataatattgaaaagatagcttctgcactaaacatagaggcgtacttattgtttgttgatcatgaaagtgattcataaggaggtgaattcatatgccgatcgctgcattggatttgttttgtggtatagggggactgacgcatggacttcaattatcaggtattcctgttattgccggatttgacatagatgactcttgcagatatgcatatgaagctaataatgcctctgaattcgtcgttgcagatgttgccaacctccaaggacaagatcttttggattactacccggttaatacaacaaagatcctcgtaggttgtgcaccttgtcagccattttccaaatatacccaaaggtatcgaaaagaaggtcacaccgggaataaatggagattgttggattcgtttgcaagactggtacatgagcttcatcctgagatggtatctatggaaaacgtccctgaactatcagggcaatctgttttccatgattttgttcgtgcattggaagcagaacattaccatgtcgcatgggaggtagtatattgccctgattatggtgtatctcagggtagaaaacgacttgttttattagcttcgcgtttgggagaaatacgattgatcccaccaatttttcgaccagacaattatcttacagtacgagatgtaataggaaatcttcctcctattttagcaggacaggcagatgacaatgatccactccattgtgcatcgcaattatctgccataaatctggtgcgcatagcacattctgtgcctggagggacttggcgagattggccggaagatcttcaacttgaatgtcacaaaaagaactctggcagtacatatccgtctgtatatggacggatgtcatgggacgaacctgcgccaacaattacgactcagttttatgggtacggtaatggccgattcggtcatcctgagcaagatcgtgcattgtctattcgagaaggcgcaatgttacaatcgtttcctgcagactatgacttcgttgctccgaacgaaagaattagtaagcgtgagctcggtattcatattggaaatgctgttcctgttaatcttggggttgcgataggactaagtcttcaaaaccatgcacgggaggtcggaattgatgtctaagcgtaaatatattactgaggatcagcggttaaccgctgatgcacaaattaaatctttgcaacgacagattaactatgataccaaagattacacagtagagcttgtggttcaaaaatttaaaaaagatgagtttttcattccggattaccaaagagggtttgtttggaaagaaaagaataagtcttcgttcattgagtctgttttgcttgggctgcccattccgttcatgttttttgccgactgtgaagatggaaagttggagattattgacggagctcaaagggtgcaaactttggtggcttttgtgactggtaagcttgtcctgtctcaattaccaaagctaagcgctctgcatggatttagatttgacgatctatcggaggcgcaaaagaggcgcttttggaataggccccttcgtattgtagtattggaagaatcaacgcctaaagatgttcgccaagatatttttaatcgaattaatacctcgggaataaaagctaaagaatctgaaattcgccggggctcttatcccggtcgtttgacagactatattgatgcatgttctgcgaatgagcgatttgttaaactatgtccagttactgatgcccaagaaatacggagggagcgcttcgagctattattgcgcttctttgcctattcgaattgttatttggaatttgaccacgcagtaaaagatttcttagatgaattcttgatcaagaatcaagatacctttgatgaggctgcatacacttctgagtttaccgcagttttgacctttgtagaaaataacttcccctttggttttgcaaagacgaagacctccaaaataacgccaagagtacgatttgaagcgctctcagtcggggttgcacttgctttgcgccaaaatcccactttgacggtttcgaacgtcgattggatgaaatcggatgaattcagacgcttaacaacatcagatgccagcaataaccaaggaaagcttaaagagcgtgttgaatatgttcgcgatcagctattaaaggatgcgttacccaatgaataacacattcattctatttgaagatagaaaggcagaaatagagttctactactctatcatgctggacattgaaaacaatacaggaaaaattcaaactattgataactcaaaatttttccgtatcttaaagtccaattttctgcttatgctttacaatttggtagaagcttgtgtcgtaagtgggatgttggaaatctatgagagtcttaagcaaagccaaagtgggtacaatgaactgattgaagagatccaaagcctgtggtcgaaatataaaatcggtgagatctacaaaagcttgggaactcgatcttcttacgaaaaaggcgtacgagaaattattgcacaggttattacagatgaaccggtgtttctgaatcgagcggctcttgagattagtggaaacttagatgcgcggaggataaaaaatctctgtgataaacattgtatccgttatgttgcttctgatgacgatggatgccttaaaacggttaaagagaaacggcaaaatcttgcccacggagacgaatcctttggagattgtgcccgcgacatgacgcttagccagttagaacatattaaggatgaagttatccggtttattggttcgattttaaacggtatgaaaaactattacgataataaactctatcttagagagcccgaaaagaaaaagaagaaagcaagcaaatgttgactctgtaagcaaaatgaggaaaaccgtaaaatcgccgatgtagttgcgggagaatttctgccacatcggcgattatacattacctgaggatttgatttaggagaaacttatggtcaagggttttattcactataaagacgccagaattccttttgttatacaggattatagaatggatttgtttaccgacgattctattcttaatgcgtttatagaggaatacaatttccggactgactatgtattaactggagagtgttttgattcgggctccatttctcgaaaaataattttaaatgttgagagaacaatgggtagtacctgttatctaaactgcttcctaattaatcaaatcggttacgatagccggtttgattccgtcacgttcaaatctgacttgctggattgtattttccgatataaacatcgcttgacaagggcacacagagaaaaacaactgaaaatgagctgccaagccttacacaatgcaccgcctaacaggacataggcggtgtttttgtatgcagacagcgttttctctgtgtgctgatatgggccagccgtgcggcgtggcctaaattcttgtcaaggaggttattcgtgtcatggcagaagaaaacaagcatccccctaccacggaggaacagaccccgcctgaaatgccgggaaaagccccggaaaaggagcaggccgagatccctgatgtgggcaccggccccgctccgtccgcaaaggtgatcgacctttccgctgtgcgttccacgccggaaaaggatgctccgacggacatccccaaggagccggaagcccagcctgtttccgtcaccgagtacagcaagcaggaatggaaaaagcccatgccggagccggagaaaaccaagcccaaacggggccgccccgcaaaatccgaaaaagctgcgcctaccgagccgggggccaagaaagaggcacaggtggaaaagccccgccgtggccgcccgtccaaggcggaaaaagtggccccggagcagaccaagccgcccaaggctggcaaaacccatgcagcccccgaggaaaaggcagcacctccggccccggaagtgccgcctacaccccgcgacgctacccgcgccgaaaaagaggaaatcgtctatcttgacctttccgacctgcaccctttcaaggatcatcctttcggtgtccgtgacgatgcggaaatgaaatctctggtggagagtgtccgcaacggcggcgtcaaccagcccgcgctggtgcgcccccgtgagggcggcggttatgagatcatcgcgggccaccgccgccagatggccagccagcttgccgggtatcgcaatatgccctgtatcgtccgcaatatgacggatgacgaggccattctcgctatgacggatgacaacctccgtcagcgtgaaacgattttacccagcgaaaaggctatgtccctgaaaatgcagtatgaggccatcaagcatcagggggcgcgcggcgacagcgccgaggccggaaagctctctcttgaaagcgtgggccagcgcaacggcatgagtgtgaaaaccgttcagcggtatatctggctcaatgatcttgtgccggaactgaagcagacgatggatgatggaaagctgtcttttaccccggctgtggaaatttcccgtgtgcggcccaagcaccagaagtatatcgccgtgtccattgaaggccagcaggcttcgccctccaagggtcaggcaaagcggctccgtgagctggacaaggaaaacaagctctccccggacgtgatcgacggtattttgtgtgaagaaaagaaaaaggaggatcgtgacgtgattattactggcgctgaactggaaaagttttttggtaaggaggccacgccccggcagatgaaagaccagatcatgacgctgctggaggactggaaagagcggcagccgcccgagcttgccaagcccgacaagaaaatggatatggaaaagtaacgacctctggccaccatgaccagaggctttttgctgccccgataggacaggctctttgggttataatcccccgtcgccgcccgtaatcgagcacaggcgggagtgggctgtcaagggggcttcgccccgccgtgtgcggcggccttgcccttgaccgcctgccccggctgtgctttttctccggcaagcggcgggggtatatcctccagagccgcccccttttccaagattggaaaagggcgggggaaaaaggttgacccactacattataaaaatggaggttttcaaaatgaaacgaccccttgcgtatatcaccgccgcgtggagcggcgatccctgcgaggcgacggagcaggccgccaagtattgccgtgctgtctatgaggcgggcttttcgcccatctgccccacgctctatcagccgcttttcctgaacgacgccgttcccgaggagcataagagcggcatcgacatggggcgcgacctgctccgccgctctcatgtgctggtggtgtgcggtcataccgtcaccgaggccatgaagaacgacatcgccgttgcccagcggctcgggatcaccgccaccacccttgagggcattttgaccgtcaagggacaggggcgcagataagatgacggcactccggctggggagcctgtttgacgggatcggcgtgttcccactggcggcggtgcgctgcggcattgagccaatatgggcaagcgagattgaaaaagcccctatctccatcacgaaacgccactttcccaatatggcacacttgggggatgtggcaaagctggacgggcgggagatcccgcccgtccatatcatcacctttggctcaccgtgtcaaaatctctcgcagatcggcaaccgtaaggggcttgcgggagaaaagtccagtctgttttttcaagccatccgcattatccgtgaaatgagggaggcgacaaatggtctatttccagcaatcgctgtttgggaaaatgtcatgggagcgttttcatcaaatgacaggatggattttagagccgtcctatccgctttcacagacaccgatgtttcaatgcctgcttctggaagatgggcaggagccggaatggtgcgagggcgaacgcctgacctctgctggcggctcatggacgcccagcattgggcaagcccccggctggcacgacggcagcgcgtctttgttgtggcagactttggaggacaatgttcccacgaaatactttttaagccccgcgcagtgcagtcaatttctgcgtctggcggagattgctggctgtccgccgcctgcggagatcgaggctcttttattgaagcagggcggcgcgtaccagtcacccgaccctttcaatgcttccgtatgcgggcgtccgccaaggagcggacggaaacagcgttccgaaacagcttcggactgccaactgacccttttcccactctgttagcgggcggcatttcgccctttgccttttggtatgaggacgatcccgccgggggctgcgtccgctttcccacggaaacggaatgtgagcggctcatggggctaccggagggctggacaaagtacggcgcggacggtgaggaaatcctatcctcccaccgctaccgggcgctgggaaatgctatcgcgctgccctgcgccgagtacattatgcgcggcatatatgatgttctgacaaggaggtgctgaaaatatcatccctgtttgaagcctatattaccaacctcggcaaatacaacgaggggcggcttgtgggcgaaacgctgaaattcccggccaccacggaggaggtgcaggcccttttgaagtgcatcggcgtggatggggtacggtatgaggaaatcttcattacctcattcgacggtgatgtgctgggcctgtatgaccatttgggcgagtatgaaagtattgacgagctgaaccatctggcccatgtgctgtctgacctcgaccagagcgacattgaaaagtttgaggccgtcattgacagcggcgaatacacaggcagcgtccatgacctgatcaacctcgcgcaaaatctggattgctatgacttctaccccggtatcgacagcgaggaggcgctgggccgggcctacatcgaggaaatggaaatgctggatgtgccagataatgtgctgccctacttcgactttgaagcctacgggcgggacgtgcggatcaacgagggcggccattttgcccccggcggctatgtgttcaataatggcggcagctttgtggagcggtatcacgggatggaggatattcccccggagcaccgtatcttcgcctatcccaagctgaatatccgggagcagatggcggcgtatcaggaggtcatagaccgttcggctctgaacgaggaaaaacagcggctccccgccagccgcaaagaaagataggccgcttctggtcacggtggccagagggtaaaggaggtgtaagctatcgtcggagatgaagtgtcccggcagaccatcgccgtcagcgtcaaggcatccaagctgaccgcccgtgcgctggcctatgtggtggcagccgtgggccggaagatcgccaaggagcaccgcaaggcgcagacaccccacggcaaacagagtgtgcgaaagctcatgggccacggtggggacaccaacgccattgaagtggacacgcctaagctgtttgacaaggtggcccggaaatggggcgtggactatgccatccgccgcgtgggggatgaaaaatatctgcttttgttcaaggcacggcaggccgacgccatcacaggctgctttgccgagtattcccgtttggagctgaaacgggccaagtcccggcagacaccgatccgggagcagctccggcgggcagaggaacaggtgaaaaagcagccccagcgggaattgacaaaggaggcagcgcatggcgacagataaaatcaggaaatacctgctcctcaacctcccgtacttgtttatcctgtgggcctgcctgaaaatggggacgacctaccgactggcggctggggccgatttcgcccataagctcatggggctgggccaggccatcggcccggcctttgcggatttcgcgccggggcttgccccctttgactggctggtgggcatcgcgggggccgtgggctttcgtctgctgatctactgcaaggcgaaaaaggccaaaaagttccggcacgatgcggagtacgggacggcgaggtttggaacggaaaaggacatcaagccctttgtcgatcccaagtttgaaaacaatatgctgctgaccgccacggaacggctcaccatgaacacccgccccaaaaatcccgccaacgcccgcaacctcaatttctgcgggatcggttcgtccggctccggcaagacccgcttttggctcacaccccagcttttgcaggcccattcctcctatgtggtggtagaccccaagggcggtgtgctggggcaggtcggggcctttctccagcgccggggctatcagatcaaggtgttcaacagcatagatttttccaagtccatgcactacaaccctttatcatatatccgcaacgaggccgacatcctgaaattcgtgaacgccctgatcaccaacaccaagggcgagggcaaggagggcgatccgttctggacgaaagcggaaacgcttctgtactgcgccctgattgcctatatcatttttgaggggcctgccgaggatcggaatatgaatacgttggtggacatgatctccggcatggaggtcaaggaggatgacgaaaactataaaaacgccgtggactatatgtttgacggccttgccaaacgcaaaccggattgcttcgccgtgaagcaataccgcaaattcaagctaagcagcggcaagacggccaaaagtatcctcatttcctgcggcgcacgtctggccccctttgacatcccccagcttcgggagatcatgtcctatgacgaactggagcttgaccgcatgggagatcggcggacagccacattcttctgcatcagcgacacagacagcacctacaatttccttgtggcgctggccttttcgcagatgttcaaccttttgtgtgaacgggcggacaatgttcacggtgggcggctgccccatcatgtgcgggtactgtgggacgaggcggccaacacgggacaggtgccccagcttgaaaagctggtagccgtcatccgctcccgtgagatcagcctgtgcctgctgtaccagcagttggcgcagtgcaaggccatctacgacaagaacgcagaaaccatcctcggcaacatggatagtgtgctgttcctcggcgggcgcgaaagctccaccatcaaggagatttcggagaactggctgggcaaggccaccatctccatgcagaccgagggacgctcacggggccagtccgaaagctacagccagaatacccagcggctgggccgggagctgatgaccccaagcgagcttgccaccatgcccggagatcggtgtatcttgcagcttcggggcctgccgccgttctactccaagaagtacgatttgaagcagcatcccaactacaaatacaccgccgaggctgacaaggtgaaaaacgcttttgacctcaacagccttgtgacacggcggatggacaagctcaaccccaacgaaacctataccgtttacaaggtggacgtgccggatgaggcgctcacaggcgaggacgaggacatcctcaactatgacgacctcgatgacccggacgcctttgtataacctctggtcacagtggccagagggagtagctgccgccagaaatggcggcttttttcatggccgggaacatcccggagaaatggaggacttatgcagttttttgcttctgccgttactaccctgcaaactctcgtcgtggcgctgggcgctggccttgccgtgtggggcgtggtcaatctgctggagggctacggctcggataacgcagcggccaaaagccagggcatcaagcagttcatggctaattaaagggagcaaaaagaaaggaaaagcacaatccagacggtatcagcggcaggttacaagaataaattgtgatttcacaagattggtgctataataagagaaaagttcctgccggggcagccgccccggtggtatggataggaaggcgggaaagcaatatgcacatcagctataaaccactctggcatacactgttagagcgtgatatgagaaaagaagatttaaggcttgctgctggtatgacaacgaatatgattgccaacatgagcaaagagggaaagcacatcagcatggacacattagcccgtatctgcgaaacgctgaattgtgagattaccgatgtaattgagttagtaccagacgagcctgcttccacaggaggtaaggaacatgagcgaattgaaaccaagaataacagaaaacggaattgattatatccttgttggagattactacatcccagacttgaagctgccggaagaacaccgccccatcggaaagtacggacggatgcaccgggaatatttaagagaagtccacccagccagattgaacacattgaccttgaccggggagttatggacataccttgcagacctgaacgaacaggcacaggaacggttagacaccatcatggagcagatgaaagccaccgagggcgtgaccgaggaattgaagcgtacccgtcaaatggaatgggtgcagcgttgcaataacattcacaaccgagcagaagaaattgttttgcatgatataatttattcatacgggagtaattaaatcggaggtatataagatgattgaaattgtatttggtgaaagtgcctgtggaagtttgaaaattgcccaaacttacggtaagggaaagtatagaggaagtgcagtttcggtctttatgaggcacgaagatgggagtgttccatcttcagatgaaatgaaagaagcacaaattcaagcacaggaacaagaacatattgcttgggagaatgctattccattgggaggcaagagcagtgatgtttattgttttgatatggctcttagtgtgggagatatttctgataatggaattggcgaacagcggaaaaatgttctcaagaaaatgctgtctgtctggtttgtagaggatttagactatcaggttgaagaaaaaatacagaaaattaaaactacattgtcttcggttattgaacgatatgtagctggggaagaagttcgtatttggtatagctataatccggatgaactttgcggtatgtactggcttatgaaacaacttcgaccattaaactgtcagacaacaatttatttggttaagttacctgcctgggaatatggaaaagaaaatactatgacatccaaaatagcatggggtgaggtttctcctggcgaatggggaaaatatataactctacaagaaaaagctaagcctgtatttctttcagcttgtgctatgaaatggaatcaacttcaaaatgaaaatgcacctttgcgtgcaatgctaaatggtaaattgcaaagtgtttcagaagatatatatgatagtttcattcttcgtgaaattgcggaacagccagagcaattcaaaatggctattgttataggtaatgttttaggaaaatatcaacttggaattagtgatgtatggatttctaatcgcattgataaaatgcttgaagatggtgtgttggaaattatacaggacgcaccaaagggagaaacaaattatcgccggatattaagaaaacgaatgaaataataaccacagcaagaaccgctgctacatggaaggcaccccaaccatgcaacagcggttttttttaccgttttttcctctggctgataggcgttcccattttctttgattttttgagaatccgaatgagccagcgaaattcttcatctgacagatttttatagttgataccaagttgcttgcagtaaaggacaaccagcttttcatcccggctgcccttgaaattttcgaccgcttccagattttctttcagttcatcggcaacggtggtctggggtgcactctcactgtcctttttgtgggcttcccgaatatcccggataatgaggttgaggtcatccagaaccatgtgactaaaatactcatcatcgctgatatgggcggcttgcagcactttcaaatgcgggtcatcttcgccggggcgataccgttcaatgatttcatgccggacggtatcgacaagtgcattgagattttgaatctgcatggtggcaatcccgtccacataaatctcaatgtctgcaagaaacttgataaaatctttatgtgtggcaagctcacagagcagacggttgttaatccgactgcttttcagaagtgctaccatctcatcattcaaatgcagctccgtcaatgacgtgttgatctgctccctgttctctgtccggcacagtagataatcaacggaaaccccatagaagtctgccagcgtgataaggttgccatgattgatttccttaaaatcctctttttcataacttccgagagcagatttggaaatacccgtcagctttgatagttcttccagatttaagcctttgtccttgcggagttcccaaaggcgttcctgtatgcttgttgctcctttcatgggcgcacactcctttccggcggtttcattgctgccgcttaactggattatatcacactttccgcaatcgtggaaatttctgatttttactcctaattcctactttgtggacatacggcacagggcacaaaaatgttctatgatacaggtagttcatcgatggattattccaatcgaatgaccagcctgtgtgggatatgcttccccggcgatgtagtgccatgacttttggcagggatatggaggaacccttaccaaaacgagcataccaaagggagcgatacgccgctgtgagattcaggggaggaacgacaccggggagaactggcgaactgacaccgaaatgataccgaaacacgacaatctgatagggggacagtctaccctatcgctgatacttcgggagattttaagcggctctatggctgtaattttgccgaaaatcgccccgaaaccatacactaaaacgggaggaagcgcaatatgccgagaatgagcaaaaagaggaagcatgagctttccttttacctcaatgaccgggggcgtgtcacttacaacgaattatgccggaaatgccagcatgggtgcaggcagagcttccgggcggttgtgattgactgcccccgttatttatccaaacgagcaaagaaaaaggaggaacacaccgaatgaattttgaatttatgacgatagacacaccattgccgccctgtatgccctttcccatagcgttgacaggatttccagtcagcagcaccgcaaaggtcatgtactgccggatgctggacgctatgctatccaaagggcaggaggacgagcacggaatcctgtttgtctgcttccctgttacagccattgccgcagtcttgtcccgcagctctatgacggtcaagcgttctctgaatgaactggaaaccgccggacttatcatgcgggtgcgtcagggcgttggagaaccaaaccgaatttatgtgctgataccgggaaaggaggacgctgcccttgcctgatacctcaaagctggaaaagctcaaccgggagctggagaaaagcgaaaagaaactgcggaaagccatcaatgatgaaaaggcattgcagcaccagttaaagcagcttacccgaaaggaacggacgcaccggctctgtacccgtggcggtatgctggaaagttttctgcaagagccggaacgcctgacagatgatgatgtcatgctgttgttgaaactcatttttcacagacaggacacgcaggaattattgaaaaaactgctggaacggaagaagccagaaaccccttagtttactaagggcgcaattatacaccacccagaggttggtgcattgcgttctccgaaggctcctcgccggagggctgtgattttccgcagtcatggtctgctccaaatcatacaggggacgctacacttcccctgcgctggctgccgccagctacccttttgtggacttgccatctggggacatcttgcattgcaagttgttcccagccgacaagtttcataaaatacgctatcttttcgataggcaatgaagtataataaaattaccaataaatcaaaaattggcgaaggagttgattgatggacatgattagaatacttcaatttttagtattggcttttggtttaaaagaattgtttaatgcaatggaatatcacaaacagaagaaaaagaaatgggtaattgcctctttatgtatgggcatttttgcctgtgcttgtgcaattatttcaataacaggtattctgtaagtcggaattgataaggaaaaggaggatacacagatgaaaacagtaattctttataatattatttctcttatcatcatctttgttttgatttttgtcctaagaattgtcagtaagagtgatttacgtaaaaatcaacaacttattattaaagtcattacaactattttaattgtttgtgtaatagcatttgtgctttttattgatgcaatagcagttggcattataggacctgttccaaattaacaatcccagtttaccatccgcacatcgggtcaatttgccccgaacttttacaattaaatacccgccgcccacatagcggcacaccgagcaggaaatctgaaaaaggtctcctgctttttttctgccaaaatgaggtggtaaaacgccaccccatccaccaattaccgaaaggagggacacgaaatgccctgcccacacaacgaaatcacgattgttcagcgcagccagcgacagtctgcggttgccgccgctgcttaccaaagcggcgaaaagctgttctgtgaatacgaccagcaagtgaagcactacccggaaaagcgtggtatcgtccacaatgaaatcctgctcccggcaaatgccccgccggagtatgcagaccgcaatactttgtggaacgccgccgaagcggtggaaaaacaatggaactcccagcttgcaaggcggtgggtgcttaccatccccagagagataccgcccgaccagtatgctgtccttgtccgggagttttgtgagcagcagtttgtttccaaaggcatgattgctgattttgcaatccatgacccccatccgccgggacacaatccccacgcccatgtcctgctcactatgagggcaatggacgaacatggaaaatggcttcccaagagccgcaaggtttatgaccttgacgaaaacggggaacggataaaacttccgtccggcagatggaaaagccacaaggaggatacggtggattggaacgaccagaagtattgcgaaatctggcggcatgaatgggaggtcatccagaaccgctatctggaagccaatgaccgcccagagcgtgtggacttgcgttcttatgccagacaggggcttgatattatccctactgtccatgagggagctgctgtccggcagatggaaaagcggggtatccagacgaacatcggcaacctgaaccgggaaatcagagccgccaaccgcctgatgaagtccatccggcagcttatccaaaacctcaaaggctggattaccgagctgggagaaaaacggaaagaactgcttgcacaaaaaacggcggaggaagcaacacttcttcccaatctactgatgaaatatatggagatacgaaaggaagaacggaaggactggacgaggtctggacaaaatcgggggacttcacaggacttaaaggcagtcagcgaagccctgtcctatctccagcaaaaggggctttccactgtggaggacttagaagcatttctggaatcttccgggaaatcagccgcagattaccgcaatcagatgaagccaaaggaagcccgcagcaaagtgattgacgggattcttgccagccggacagactgcaaggaatgtaaggctgtctatgagaagtaccagaagatattttttaagaaaacaaaggagaaattcaaacaggaacactcggaggttgcccggtatgaaaaagccgccacccaccttgccaagcacccagatgataaggacagtacccaaaaggagctgcaagaggagcaggaaacgcttctggaagaaatcgcagagttgaaagtaccactgaccgaggtacaggaggatttgaagaagctgcgggacatccgctactgggtacggaaagccacacccggcacagaggaaagtaaagagccgcctaagaagcagcccatcaaggaagtcttgcaggataaggcagacgagaaaaaggctcaaagaaccgccccggcacaggcgaaacacagacaacaggatatggaactttaacaggcacttgccattttcaatcagagaatgtcaggtgcttttcttattttcaaggagggatagatttgaatgtatttgaagctgtgaagcagtccgtcacaacaagacaggctgcggagcattatggaatccatgtaggtcggaacgggatggcttgctgcccgttccataatgataaaaccccaagcatgaagctggatcggcgttaccactgcttcggctgcggtgcggatggggatgtgattgattttgccgccgccctgtatgggctggcaaagaaagaagccgccgtacaactggcaaatgactttgggctttcctatgaggactggaaaccgccgggaaaggcaaaaaagcccaagccccggcagaaatccccggaggaacagtttcaggaagcaaagaaccgctgcttccgtatccttgccgattatctccacctgcttatggcatggagaacggaatatgccccgcactccccagaggaagcctttcatccccggtttgtggaagccttacaaaagcaagcccatgtggaatatctgctggatgtgctgctgttcggggagacagaggaaaaagcggctttgattgcggactacggaaaggatgtgatacagcttgaacagcgaatggcagagcttgcagccgcagacgcagcaagaactaaaaaacaccatgaacgccatgcagccgccccagagcattgaggaaatcaaggcggggctggaaaccaccgagaaaggcggtgtccgccagagcatacggaactgcctgaccgtattccagcgtgaccctctgctttccggggctatcgcatacaacatcctgaccgaccgcaaggacatcataaagcccatcggttttcacagagaaagcacagccctgaacgatacggatatgaagtatctgcttctctatctggaagaaacctatgggcttaccaatgagaaaaagattgataatgccatcgggattgtggcgaatgaaaacaagtaccatcccatccgggactacctaagtgcccttgtgtgggacgggacagaacgaatccgtttctgtctgcggcactttctgggggctgacgcagacgattacacctatgaagcgttgaagctgttcctgctgggtgcaatctcacgagcctttcagccggggtgcaagtttgaaatcatgctttgtctggtaggcggtcagggggctggaaagtccaccttcttccgtctgctggcagtccgggacgagtggttctccgatgatttgcggaagctggacgatgacaatgtgtaccgtaagctgcaaggtcactggattatcgaaatgtcggaaatgatggcaaccgcaaacgccaagagcattgaggaaatcaagtcatttttaagccggcagaaagaggtttacaagataccctatgaaacccacccagcagaccgcccccgtcagtgcgtgtttggcggcacttccaatgcccttgacttcctgccccttgaccgttccggcaaccgccgctttatccccgtcatggtgtacccggagcaagccgaggttcacattttggaggacgaagccgcttccagagcctatatcgagcagatgtgggcagaagcgatggaaatttacagaagcggcaggttcaagctggctttcagccctgccatgcagcggtatctcaaagaacaccagcgggattttatgccggaggacaccaaagccgggatgatacaggcgtatcttgataagtacaccgggagcatggtctgctccaagcagctctataaggaagccttgaaccatgcctttgacgagccgaagcaatgggaaatccgggaaatcaacgagattatgaaccagtgcattgaccgctggcggtacttcccgaacccaagaatgttttccgaatatggcagacaaaagggctgggagcgtgaaaacccggcaacggactccggcaacccgtctgaaaaaacgatggacggttttgtggaggtcacagaacagatggagcttccgttctgaaaatggcagcccgttgcaccccctgttgctatcccgttgccgagccggttgccggggaaaatcccgaaactatcggcttttctcccctatgacaaccaaaacaacagaaaaataaaagaaaagtataaatagtaaccatcgccagattgagattgtttgcaaggtcttttgaagcccgttgccggacttcgttgccgacaccctctgtctggctattttcatgtatggaggataactgcctatggcaaaaaacaaaacagagattcatgttacaacggtgtttgacggggagctggacgcaaccgatgtgttcgtcagcctgatttcccagaaatacggtaagacaaatacgaaagaatatcttgctaaaaggaaagatatgagctataatgaagatgaggttcaaaagagccagataccgtctggattgtgtgggtaaatggctatgatgaacgaaatggaatacagaacaatcggttcggcacttgccggagggtatcgtgcagcggtctattgcaggctgtcaaaggacgatgacctgcaaggcgaaagtgccagtatcgcaaaccaagatgtaatatgtagagggtggtttctaccgcctaatactattacatgactggcggctcatttgtggtgaattggtctggcagttgtgggaaaggaaaaaaatccgcataactgctgacattttagcacgaagggagcatgaaaatgaagtctatttttgaagaaatgggcggcacatatacgaaggttggcgattactatatccccgaccttgcgctgccggagaccgaggaatatcagatcggtaagtatggccgtatgcgccgccgctacttgaaagagcatcgtcccgtcctttatgcacactacctaacaagctgcaccctgcatgaacatcttgcagagatagacaaatcctgcaatcagcgtatggagatcatgtgcgaagctatggcacgactggaaggtgtgaccgaggcacttaaagctaccgatcaaatggaatgggtacggcgcatgaacaacattcataaccgtgcagaggaaattgttctgacggagcttgtatattgctaaacacatgttagccccgcatcagcatgaatgaacgctggtgtggggctaattctgtatcacttagctctttatattccagtagccttttcggtcagacccgatgcgctcgatgattcctttttccttcagctccttcagacgctgagaaactgtttttctgctgatagatagcttatctgctatggtggtagatgtgtatgcaggatcttcggaaatcagggccagaatttgcatggatttttcatccaaggtttctgttaccttttctgttaccttttctgttaccttttctgtcaccttgtaggtggcagatcgaataacccgatcctctgacgctgtaaactgaatcataatatcgccgggatgcacggtgtacgcaggaagcgggcttccatcttccttgcaagcctgacagattttctcaataccacgtccccagctctcgatgaagccggccaaataatacacattcgcaatcgccgtgttgtaagggcgggatgcgtgtttggacatcaggctgtctgccgtccagttgtctggaagcctaccacagttagcgatatacagcttatcctcatacacgctgatctgaatcggaacgccgctttcatattgcttgtggcatagagcgttaagaagggcttcacgcagggcagcgtcgggaacaaaataacgctcaatgcgctgcatcccttcgtaagtgattttcgctttcatatatttcagatggatgacttcaatgatcttgtcaatctgttccaacaaggagccgtgaatttcatcctgataacggagatcggcatcattctcgaaaaagccgatttttgtgtatgcgcccagctgccagcggtcagggtctttgcagaacagcagcatcgctgcgttggtataatacccggcattggtcagacgcagcttttccattaaatccgctttgtcctcgtctaaaacgctttggtcgatccggcccttcttggcggcaagggtcttgaatctcttgaccaactcatcatcaatatcatccaacgtaaatcccggcaagggcatattatcccacgaagcaccacgtttgcgtagaatgaagctctccagttctgggccagaaagggtctgcatggtgctgccgcttctataataatagacacctttgcagtttatggcaacgggatatggtggaacaacgatttccagatattctttcccgtcacgctccagctgattgacatccaccacgatgctcatggcatttcggattttgtttggaacatcctccagcagcttgcggatattgggcaggccgataacttttccatcatcgtcacagccaatataaatcttgccgccctgtgcattggcgaagccgcaaatccattccagatagtcatccttccacttagctttccattctatgttctgattttcaggcattattatcaccatcctctgatttattctttccccggctcttataaacattatactgatttttacaccttgcactgcaaaaagcggagttagcccggttactcaggaacactttctgacactgcttgcacatccgcaacggctttgtgctgtccaccagcatgaagctgaacatcatctgaatccccaacagcagggaatggaaatcccaatagatcgttggcctatccaacagctctatatgataggtgggtgcaatgccgccaaatgcagccatagacttacgcagcatattccggctttcttcctccatggaatcatagtcattataatagaagaaagaggtcagcatattaaatgcccaatccttgagttgctgtgccacccaatcgtaaggctctgcatacgcccgctggaagctcatggtctttgccatcggctcgtccataaaggtcatggtcagtgcaatcattgcccggtcgctggacacattccaactggattccacaccgttcttgaccacatccagcttatcaaaggggtaaaacagggacagatacttctccgtctccatcgtttcttccttgataaaatggttctttggcagatataccgcctcataatccataaaggacggcgtggtgggcagggccgtcatcaggcccagcagcccatagtgggtaataaattccaagattgccttttctacctctggctcagagcttttcttgccgttcatcatcagcatccccacattcagagcatccagcacaatgtccggggcttccttgagtgggttatagacatccggcctggcatcctttgccggggtgatgtatttcttcccgtccttgcctgttttgatttcatagcgttcataccgcacccaatgggaacgggattgctcaaaaaatgtattcataacgcaaatccttcctttcggtcatctgcttatcaaattcaatcagatcattcgctgtccttgctgctgccaagggcagctttctttttcctcggctttgatttgttctcccggaggataacggcgtccttgccataggctttcagcaaaagcccatattcctctaagaactgccgttcccgcagcgttaggcttccacagtcgttctgtttttccaaaaggtaatcataaaccgctctttgcagcttcttgtggatattctttcggagctttctaatgtttcggtctgtctgtccccgtatcatacccacctgtatggtgctgtactgccggatggacaggtaatacagcacttccttctgatcaatggtaaggctgcgtatcagctcagaaataaatgagcttgcaaccaactcatgcagttcataggggcaagaaaaaatgatatccagaaaattgccgctggcaagctggcggtatcgtggcagattcaaatacagcggaatcatcttcggattgggaactgccatgtattctaacggaacatctccccggagattttcatggtcacgctcccgtcgttcccgattccgatccaacctgtcccattcgctgacaacgtatcgaaagtcgtcctctgttcttgcagcatcctccagccgtgccaacgcctctgcccgtatctggcgctttaagcgtttttcgctgacaggagcagcttcttcctcttcgtcctccagttctacggtgtagtcccttgggttttcgtcctgctccagctctctttccagctctaaggctcgttcttcggagaggatttcctctaactgctcgttttgtatcgtcagatcggaggcttcatcccattcggttaggtcatcaccgtcatccgggaacaggagaaatgttctattttcatctgtcatgacctcacctccgaaaattttttgaatttctttcaaaaacagttccgatttacaccccggatttctcctattagtgagagggtaatctgataagcggttatttaggttactttttcaacccgtatcaagagaaaggaggacgcaagttgcggtagctttatgaaacatgacacaagatgccaccgacttacatcagtcggaaccaccattagtatatcaaacgaacatgaatttttcaaggaggaacgctatggataaaaacaaacaggcacagtatatgataagacgtattggcggcaccacctacaaggtgagagtcgctttcagtgaaagtgggaaagagacaatggaggataaaattttacgaatgatacgcaacgaagtagttacaaacgacggaacttgtgatataattggtgtaccacaaatgagccgtcagtctgaaaggagcgcatcatgagcatcattcagactgaggacaagatcaccgccttatacgaacgactttcccgtgacgatgaccagattggggatagcaactccattgtgaatcaaaagaaatacttggagggctattgcgcacagcaggggtacacaaactttgcccattacacggacgacggattctcaggcggcacatttgaaagaccggcatggaaaaagctggtggcagacattgaagctggcaaggtggctcgtgtgatcgtaaaggatatgtcccgaatcggacgtgactacttgcagaccggcttttacacggaggttatgttccgtcagcatggcattcattttattgccatcgccaacagcgtggacagcaacgaccagaacagcaatgaatttgctccgttcctcaacatcatgaacgagtggtacttgcgtgatctgagccgcaagcagaaaaccgctatccgtgtgaagggggaatcaggcaagcctaccaccaacagtgccatctacggctataagaaagacccgaacgacaagcaccattggttgattgacgaggaggccgccgccgttgtgcggcgcatcttccgtctgaccatcgagggaaaaggcccctatgacattgccagaatcctttttgaagataaggtagaagctccggcggtctattttgcaaggaaaggcattggcgtttggaaaagtaagaccgagttcgcatatccttataactggagcggctatattgtggggcagatattgtctaagcctgagtatatggggcatacggtcaatttccgttcccacaagctgtcatataaggacaagacctctattcctaatcccaaggaggactggctgatcttcgagaacacccatgaggccattatcgagccggaaacatgggagcttgctcagcaactgcggaaaacgccacggcgtattgataccataggcgaagccaatcccctgaccgggcttttatactgtgcggactgcggcgcaaagatgtataatcatcgttccagaggcggtacagaaggcactccgtatccgtcggatttctttgactgctcctcttatacactggcacatcagaagcatggaaaggactgctgcgggcactatattaccactaagtcgctgcgtatccttattttagagacaatccgcactgtcagccagcttgccatagcagatcgggaaaaattcaccgagaagatacgagccgcttcacaggtcaggcaggtggaggcggccaaagatgccaaacgaaagctgaacaaagaccgtaagcgccacagtgagctggatacgatcattaaaaagctctatgaatcctttgccgtaggccgaatttctgaggaacgctttgacagcctgcttgctgagtacgaagtcgaacagaaaaacctttccgcacagattgcagaaacggaggaaagcctgacgagctatgaggaagatactgcccgtgtagagcagttccttgctttggcagaaaagtacaccgatttctccgagctgactacaccgatgatcaatgaatttattgataaaatcatcgttcatgccccggagcgcatcgacggggacagaacgcaggaggtagaaatcttcctgaaattcatcggaaagtttgaacttcctgccccggagctgacagcagaggaaatcaagcggcaggagcagctacgccagcatcgcatcaaaagccgggagcgctatcagttgattaaggccgggaagcacaccgttgggcagccttttcagctaacctgtaagtgctgcggtcagggatttgaatccaaaagctcggctgctatgttctgcggaccgaattgccgggcgaagttctaccggcaggaagcggcagaaaacaggcggcgtgactgcacttgtgaaaactgcggtaagaccttttccaccacaagaagcaatgtcaagtattgcagtgatgagtgccgatatgaggggcatatcaaaggccagcgggttcgcaatgcagcgaacaggaaggaaaaactggcagcggagacagttacctctccggcttaatatttccaataaaacaataaattttgaggaagcggtttgccttatatcagggcaagccgctttttctacgcaaaggaggacacatgaatttattcgaaaccgtaaaaaacaacgtcagcctgcgggaagcggcacaggcgtatggccttgaggtcaaccggcacggcaaggcgctctgcccctttcacaatgacagacaccccagcttgtatgtggcaaacgaccattattattgctttacctgcggagagcatggagatgtcattgacttcactgcaaggttgtttgatctcaagccctacgacgcagccatgaagctggtgatagactttcatcttgacccggacaagccgcccagcgcagcggcactcaatgcaaagcgtatccgaacagaagcacagaagctcaaagaaaacgagcgtctgtgcttttctgttttatcggactattaccgttgcttggaggaatggaaagcatactatgcgccgcaaacgccggatgagccagtccatgatttattcgtggaagcctgccacaagctcagtcagattgaatatgaactgaacattctcacctttggtgacagctatgagcgtcgggaaattgtacaggactggatgacggatggtgaaatcatagcactaaaggagcgtctggaacaactgcgaaaggaggaaacctatggacgaattgaataccccaatggttatgccgcctgaagaaagcattcccgattggtatgatggaaaacgcatcaacgaagtgctgttttgtcagcagttcttaaaaaagcatcccatgaaatgtgtcagaggaaggctgttcacagtggatggactgattgaggacgaggcgcaaatcggcaatctcattctggaggagatctccggctgtctgacctccgggctttccaaggtggtggcaaatctgctggccagtatcaagctgcaagcctattcgccgcccctgcccatcgagactgaccgtatccatgtggcaaacgggacactctttctggatgggcgtttcaccgaggacaaaagctattgcaacaaccgtctgagtgtggcctatctccccgatgcaccgccgcctgtgcgctggctgcaatttttatccgagctgcttgtcccggaggacattcccaccttgcaggagtatatgggctactgcctattgcctaccacaaaggggcagaaaatgctcctgatgattggtaagggcggcgaaggaaagagtcgaatcggacttgtaatgcgctccatgctgggagataacatgaataccaccagcatccagaaggtagagaacaaccgtttcagccgtgcagacctggaaaacaagctgctgatggtggatgacgatatggatatgagtgccctgcccaagaccaactatatcaaatccatcgtgacctcagagtgcaagatggatatggaacgcaagggtgttcaaagctatcagagccagctttatgtccgctttctttgcttcggcaacggcgctttaaccgctttgcacgacaagtcagacggcttcttccgcaggcagatcgtgttgaccaccaaggacaggccagcaggacgagccgatgatccatttctggtggataagctgacacaggagcgtgagggcatctttttgtggtgtctggagggtctgcggcggttgattgggaacgagtatcagttcaccatcagcgatagagccaaagaaaatatggagacagtaaagcgcagcagcaacaatgtgatcgagtttttgcaatccgagggctatatccgctttaaggccgacagcgaagccagctccaaggctatctatgaagcctatctccgctggtgcgaggacaacgcacaaaagcctatgtcagcaaatcgtatcagctcagagctggcccagaatgaacggctttataatgtggaggctaccaacaatgtgtacgcagccggaaagcgggtgcgtggatttatcggagtggaggcgatgaacttgcttccttattaaatatgagaactggacttcaaaactgccgtacatgccgtacacgatgtacggcagttctcaactccgttttcaaaaagctattttaccgcaaaatcagcgttctttatgtgcaatgtgctgcgattaccgcattttcttgcggtataaacagcgatttgacaaagcaaacgcaaaatccaaagaccaatcggtgtacagcggcgtacagcactggcgtttaccgtacagagccgtacacaaacaatctattttcaaggccgcacagcggcagaaaggacaaactatgaactatatgaacaataaccctataatcatcggcatcgaccacggctatgggaatatcaagactgcacattgctgctttcctacgggcgtgatcatctctgacaaggagccgaccttcaaaagcaatctgcttgtctacaacggcagctattacaccgtgggcgaaggtcacaaggagtttatctctgacaaaatgacagacggtgactactatattctgacccttgctgccattgcaagagagctgaatatccgcaagcagacctctgcccgtgtgcatttggcggcggggctccctcttacttgggtcagcgaacagaaggatagcttcaaggcgtacctgttgcagaatgaaatggcggatttcattttccgtggtgtcagctatcatgtggagtttgccggagcggacatcttcccgcagggcttctccgctgtggcggacagactgcggggattcaagggcatcaatatgctttgcgacattggcaacggaacgatgaatgtcatgtatatcaacgagcgccgtccgctatctcagaagtgcttcacggagaagtacgggacaaaccagtgcatgattgctgtccgggaaaatctcatgcggcagtttggcgcatcggtagatgatacgattctggagcgtgtgattcgctttgggacggcagacatcagcgaacgctacctaactgctatccagaacacagcgagggattacaccgcaggcatcttccgcagactgcgtgagcatgagtatgacccggaactgatgaggctctatgttgtcggcggtggaagctgcatggtgaagaatttcggagaatatgatgccagccgggtgatgatcaatgatgacatctgcgccacagccaagggctatgagctgctgtctgcacagaaaatgcaaaagaaaggcgatcttgtatgaagcaaatctacacaacaacacttcggctgaatctggagaacgaagcagaccgcagggcgtgggagcatttgcagagccttgacaggcgagaatatcgttcagtcagcaaggcagtcgtttcggcggtcaacgcttactttgaccgtagcaagcagcttgccgatgatccctatctggaaacacgggagaaggaggacgctttcctcagccggatcgaggataccatctcacgcagcttgcagagctgtacgccggtaagccttggcggtatcctacagcttatgcagagcgcacagcctgccgctgctcttgtttcggaggaaaccgaggaggacatttcagctgcgctggattttgcagacggcttttgaaattacttttcttgattttactactatgttggtggcaatacaatccgtctttgctaccaaattggcaattctcagaatgaggaaaacaatttaccatcagttctgcagggagttggtatctgtgtgataccagttccctgctttttactatcacgaagccgcccagcggcagaaaggagccagatatggcaaataaaaagatcatgaccaaggaagaattgcaggccaagcaccgattggaggaggcacaaatgcgggatcgggcgaaagagcgaaaggcccgtaccagacgcttgattcaggagggcgctgttttggagaaagtatttccagaggctcagcaaatggagcttgaaaaattagaggacttgttatatgagaagctacactaatctgcgaggggcgttccgggcaaccggggcgtcccttccttttttatcccgaagggcgcacttactcaccacctgcgaagcaggcggtggtatcccttccgttggtcgggctcgtgcgctcttcacgaactgtccatcggacacttctccagagagggcaggaaatgccgcaagtcagcattccctgtgcagtcggcgcttctgctgatgcagagattgctgcttgtcgcaccaatccggcagatactctgcccgcctcctgcctgcgaaaacctgccaccggcagctttatcgcagatatgggcagcaatgcagcccattttctctttgcaaagagaaacagaaaccaaggggtggcgttttaccaccccctcacaaaatacgaatcgaggtgaacgcaaatggcaatttaccacttggaggcaaaggtggtcagccggggagccggacgctccgcctgtgcagcctccgcttatctcagctgctcccacatcctcaatgactatgacggagtacagcacgattacacccgaaagcaggggcttgtgtggcaggaggtattcctgccggacatggccccacccgcatggcaagaccgagaggttctctggaacgccgtggaggaaaacgagaaaaccaaggacagccgcttagcccgtgagtttgtggtagccctgcccatagagttgtccctagagcaatggcagacgctgttgacggacttcgtacaaaaccaatttgtcgcagacgggatgtgcgccgatctggcaatccacgatcctgatccaccgggtcataatccacatgcccacattctcttgacggtgcgcccgcttgatgaaagcggcaaatggcaatacaaaacggagaaggaatatctctgcagccgtgacggtgaggaacggggctttaccgctgccgagtttaaggctgcacaggctgacggatgggagaaacagtaccagtacaaggtaggcaggaagaaagtgtatatgacaccatccgcagctgaggaacatggatatgagcgtgccagcaagtatcccaaaagcaccaaatacgggagacagaatcccatttctgaacgctggaacagcgaggaacagctccttatctggcgcaaagcatgggcagatgtgacaaacaaatatttggagcgatacggtcatgaggagcgcatcgaccaccgcagctttgtcgagcgaggcattgacgagcagcccaccatccacgagggcgtgattgcccgtgctttggaacagaaaggtatcgtgtccgacaggtgcgaactcaaccgtcagatcaaggcggacaacaggctcctgcgggaactgaaggcgcagttcaagaaaattacggaggcggtgaagaacacgctgcccgctattgcagaagcgttggaaaagctgcgggaaaatatgctgatcttctgctatcagttagggcatatccgcagcagcaagaaacagatgaccggtgccttgaatattctgaagccaaatctggcacagtaccgctcccttgtgcagcagataaaggaaacaaccaaagaacggaagtccctactggctgaaaagaaatcccttcctgcgatccactttgtcaggcaccgtgagcttgcctccaaaatagccgagttgacggaaaagttagaggagctaaaaagcgaaaaggctatgctgcttcattctctggaatacccagaggacgccacaagcgatatcttccagcgccagattgaccgctatgaagataatctcaaacggcttgaggcgcaggagaataagtatgccggagagctggaggctgcattgtctgagtatgccgagctgaaagagcaagcttccggctttgattccttgcagctttatctggagcggaaggcacttcgacctgacagagagaaagcagcagcccaacgcattgaagcggcttatggcgacaagttcagttggtggttgatggagagtggcctacgggatgtgtctggctatcttgacgaatatgcacaggaaaagacaatggatcgagaactgcggcaaaggcggcgatcggagcggcttgagcgtaagatgaaaaacagagatatggaacgttaaaagtgctggaggttgaaacttcaggtgaagtctgtgacatagggggatggagataatccctatacgtcaagcgtaaaataagcaccggtatgggttttccataccggtgcttgcaatatttaatcgaattctatcacttaaaatcaaaagagttttccaacaacttatcaagtgctgccatcagttccgctcgaacagcctctctttcactttctccgcctgcattttcgatatagatggaatagttatcaaatgtgatataggcgtaatagatcacagtcttaattccttcgctgtttgcatttgtaacgaagtagccagctttaactggcgtatctccaaccatagatacatttcccttgccaattacggtagtatccataagattgttcccagacagcgaaacaacaaatttcatatcgctgtaatgaccatcaaagccaacaaatgctacatcgtccaaggtaaagagggcatctccggaaatcggaagatcaccgaaaatagtctgaacctcatctttggtcaatgctcgtgcttgcaagttcaaactcagagcagaggctaccgtatctgctttagtgaaagatatggtagttccatcacctaatgtagctgtttctgtacttttgccgaataatcccatactaaacactcccaccacgattagacagagacacgcagcaattgccccaaatttcagccaaatgcttttttgtttctttgcctgataactcgccgtttcttcgatatgacggctaccaatgccaccaacggcgtcagagatgttctttcgtgtcataaatcataccccgctttctgtaaatgatttttaagtttgcttctgattcgggaaaggcgaacagacacattgttatttgttgtacgaagcctctttgcaatttctgtaatgctatctgagtaccaataccttgctacaaacataaccctgctttcctgatccaagctgtcaaggaaacgatcaatttcctgtgacagctcctttgcatccacttcctgttcaatagtagatgcagaagttaggcactcttccaactcatcaagtgcaacatcatagtaactgtttcgctttagtgcagtatttgcgtggtattttgcggtagcgatattgcgggtaatacgaaaaatataggttctgagtgggtcaggtctttctggaggaattgcattccacgcagcaaggtatgtatcatttacacattcttctgcgtcgggttcgcatttcaaaatgttgtttgcaattcttttgcaagttgaaccgtattttgcagcaagttcagctattgcctgctcagtacgagcaaagaacagttcaatgatcttcacatcctctaacaaggtatccacctcctcacctatgtactatggatctggcggacaatcttacagaagcgagggaaaatttcacacctttattatagtacattgcaattctattttctatcgcctcagcaaaatcgtttggcaccagtcgaggtcgctcggcagtctgaaaatatggtccttcggttttggtagagttgctcgcagcagaggaggcgtaacaaaaaattaaaggtagctgcccggacagaatgggttgggtggaaaaataaataatatccgaaacaggatgacggaaattgttagcgccgagttaattcgtacacagttagtgtttaagtgtttacaaacagcccattgatattgttcgtttgtgcgtatataatatatataactatttgatgcggaggtaaactatgtttgaatacatgacagtacaggatgcggctaaactttggggaatatcggtgcgtcgtgttcaaaagctgtgtgaggagaatcgcattgatggaattgttcggctacctcgtgcatggctaattccccaagatgcccaaaagccggctgatggaagatataaacaaaataaaaatgaatttatagctgacaacaaggagaacacacgatgagtaaattgttattagtggaggatgaccaaagtatcgtatcctcattatcagactatttaggaaatgaagggttcaaaatcgaaaatgctcccggtcaaaaagaagcaatagaaaaattggatagcgaccaatacgatatagccttggtggacattcaattatcaaacggaaatggtttttctgtttgttctgcaattaaagaaagaggaactatgccagttattttcttaacggcttctgatgatgaatatagtgttgtggctgggttagatatgggggctgacgattatatcagcaaaccgttcagaccaagagaactgctttcaaggatcaacagcgtattaaggagaactaagaacacacaaaacattatcagttacctcgacttagttgtggacacaaatcaagcaaccgtatcaaagaatgggaaagagattttgttgtctgctatggaatataagttgctgttagtctttttgcgtaacaaaggtattgtcctttctcgcagaagattgttggagcttttatgggacactactggggagtttatcaatgataatacattgactgtctatatgaaaaggctacgtgacaaaattgaaaccaatccgcaggagccggaaatcataattaccgttcgtgggcttggctataaggtgggttgatatggactttatcagaaataaagaagttaaaaggcaaattgttgtcagcagtattcttattctattttggggcggcattggcattatcgttgatagcaaagctgtgtggattgttctgtcggctatcatttcatccagtgcagtttccctctttttcacatatcagagatacaagaaaattgctgattttagtttgcatattgataggctgttacatggagatgaaaaaatttcttttgggcagtttcaagaaggtgagttatctgttttacatgatgaaatatccaagatgacaagacggcttattgaacaggcagaagctctgaaaatggagaaaggtaatttggcaaatgctttagccgatatttcacatcaattaaaaacacctttgacatcgctgaatatcttaaatgcttctctgtgtaatgaggaactgactgacgaagaaaggtatgagctgatccgcgaacagactatgctcttatcaagaatggagtggctgatagccacacttctgaaaatatccaagctggatgcaggaacgattactctaaagccacaggcggtatacttaaaagatgtggtagaaaaagcaattcgtcctctggagattgcggcagaattaaaaatgcagacaatcacgcaagtgattccggcagaattaaaactatctcttgatactgattggactgctgaagccttggggaatgtaatcaaaaactgtatcgaacattcaccagagggcagcactatcgaaatcaaggcaatagaaagacctcttttgacacagatcattatagaggatagcggaacaggttttcaggaaaaagacatcccccatttatttgaccgattttatcaaggaagtggctctacaatcggtaatgccggtttggggttggctctggcaaagacgatcattgtcaatcagggtggtgtcatccaagcgaaaaatcgggagtcaggcggtgcaaaatttgaaatctgcttttatcgggggactgcttaatgcagcccctttttaagtgacatttttgtaatgaaaaagtaatgaagcagtcacttggctttgctatactgaattgcaaaaatatatggaggaactttttatggagatattaagagtagagaatatctgcaaaacctatgaaatggacaatgctcctgtccatgctttgtcagatgtttctttttccgtcgataaaggagagtttgttgcaatcattggagcatctgggtctggcaagtctaccctgttgcacattttaggtggtgttgacagaccgacttcgggaaaagtatttgtggatggacaggatgtttatgagcaaaatgaagatgaattggctgtattcagaagaaggcaggttgggcttgtctatcagttttataatctgatcccggttttgactgtcgaggaaaatatcacgctgccgattcgattggatgggcgtaaaatcaatcaggagcgtttgaaagaactgctatccacactcaaactggtaaagcgtagaaagcacctgccaagtcagttatccggcggtcaacaacaaagagtggcaatcggacgagcgttgattaacgcacctgcgattatccttgcggatgagccaacgggaaatctggacacggagaacacaagggatattatgaaacttctgcgtgaatccaatgaagtctatcgccagacaatgatcctgattacccatgaccgtgaaatcgcaatgcaggcagaccgtattctggaaattcaggatggcagacttgtgagggatgaggtgatacgctgatgaatatgattttcatgcttacactcaggaatctgttgtcgaataaaaagcgtaccctactcacacttttaaccattcttttgtcaatcagtatgataaccgctattctctgtgggggatggtcgttggttgattttttgaaagagaaagaaaaagtgtatggtggcgattatgactactacatggaggatttgacttgggagcaggttcaagagctatatagtcaaaacaatgtaggcgaagtttcgcttctccgctttgccggaaacagtttttacggggagaaatccaacagtacaatgctctccgttggcgagattgacgagaactttacccaaagattttcgttaaatcagtatttgcttgcagggcgtttcccgcaagatgaaaatgagattgttatttcagaatcttttttgaagaaaaacaacatgaatacagagattggagatacgatttctttaactcttggttcaagaatttgggatgaatataatgcccagctttccgggctgacaaattataggggcgaagaagaaagcttcgttccaacaaaagagaaagcgtatgtagttgttggtattctgtcagatgtgaatgactcaaaaatcgcagcaaactataatgcctttgcaggtgttgacaaaacggcatccgattttgctgcgtatgtcaaggcaaagaatttatccaattcgatctatacagaagccgaagaagtggctgcggcagtagacagtcatgtagcaaagtttcattcggaattgttagtctatcatggaattaccgggggtaaaggagctgcaaaactgattgctttggtggtcatggtcgtttgtcttttgatggctgcatctgcttcaatgatcagcaacgccctctccatttccttacaggaacgaattaagcagatgggaatgctatccagtattggagccacaaaagggcaaaaacgccttagcgtatatttagaagccttccttttgggagtggtgagcataccctttggattggttgttggtatcctgctatctgctctgttattaagtgtggtcagggcagcttttggagaaacattcacttttggcatcgtagaactgtccttgaaggtaaacggattgatcctgctcgtcagcggattatccggcattgcttctttgtacttcggaagtagaaagcctgtgaagcaagcagctaaaattacagttattgaagcgatccgccagtctaacaatgcggtatcaagaaagaaattccgtgacggaaaaatcgtttctttggtttttggcatttatggttcgttagcagcaaaaaatattaagcgtaatccaaaacgcttccgagcgattaccggctctattttcttgtcggtggtaattgccctttccttatatagtttctctgattttatgctttatcagacatccttggatatgaaggaggacggttcctgttatactgatgtgatttcgatgattcaatacaaagatattcctgtcgcaatcggggcattatcggatgaaaatatcactgcggatgtttcctattcttttcagcgatatatgaccgctgaattttcgcaggaacaaatcaatcctgatatgcaaggatattttatcaatggtacgaaagcagaggtatatgtcgtaggattggacgaagaacattttgtctctttttgcgatgaaaatggattcagtctggatgtgacaaatttcaatcatggaattttgctcaatcagactatgggatactataattcggcacaaaatcgggtaattgcaggctcaccgtttcttattgaaccgggaacagaaatcattccgctgggggcatccgaggatgccttgccgattatcgtggaagaaatcgtttcagaagaaaatgcaaatatccaatccatgtttgtgagagatcgagctgtcctcatcgtgcctttaagttattttaacttgctgatagatgataacgcctatgtggaaatgagaatacagacagcacagcataaagaagcaatggaatgtctggctgacagaggatttccgcaaactgtggacattgcagccgcaacgaataattccagacaggtatatacgattgcaaaactggtaatctgcctgttctcgatcctgatgacggttattatcagcttgaatgtttgtaacactatctcgaatacgattcatttgagaagaagcgaatttgctgttctgcgttctgttggtatgactgccaaaggattaaaatgtacgctattgctcgaagctgttttgtacggcgtaaaagcattggttcttgcgttgcctgtgagctttttgattcattgtgctatctactacttcatatcgtcgggtatgacaccatttgctttttatatgaacggcggtatttatgctcttgcagttatggctgtcggcgctatggtatgtatcgctatgctgtttgctgttagaagcgtatcaaaggtggaaattgtagaggaactgaaattgagcaatatgtaatcattcaatctaacaaagcaactgaaacagaggtaatagaaattgcgtaaaaagaaactggtaaagagagttgcaggcattgctttgactgttggtgcagttatacttgccattgtatgtgttggtaaagtaaatcgcattcagaacgaaaaagatattattggcacatggaaggatgcaaatgctgaggagatatttacctttcaagaaaacggggaacttgctgtgagtaaagatatgcccgattcgggtctatcctgcggtgacgcatattatagtttttcttactcggatataatctgtgttacacagggaaatagtagtgtagaatttgagatagaagtagatcaaaacgaattgaaaatcttcttcatgggacaagaatatctggaattggaaaagtaatgattacaaataaaagaaaaccattgagccgataattcgcatcctttgcggactaacggctctgcatatattttgaacgctattttcagaaacattgtgttttgcagaaaagccccttgacaaattccatctcagcgtgatatgctggaaaaatactgcgaaaagcagggatgggaggttgtggcagtctatcaggacgatggcttcacaggtcttaatatggagcgtcctgatttacagagaatgttgagagccattgagcgcaggcaaatcaaccttgtcatcacgaaagacctcagccgactggggcgtaactatctgcaaaccgggcatttgattgaggactttttcccaagaaacggtgtccgctatatcgccatgaatgacggtatcgacaccctgcgtgataacaacgatattgccccgttcaagaatatcctgaacgagatgtacagcaaggatatttccaagaaagtccattcctcttatcttctgaaagcgcagaaaggacagtttaccgggtgtcttgccccgttcgggtatcggaaagacccggaggacaaaaaccatctgctcattgacgaggaaaccgccccgattgtgcggctgattttcggatatgccctaaacggtcatggtccgaactatatccgcagacggctggaggaagaaaaaatcccctgccccacatggtggaaccgggaacgggggcttcgcaatacccgcaccaaatgggaaaagaaagacccggaaaacgggcggtatatgtgggacttctccgttatcaaagaccttttgatgaatcccgtctacaccggggcgattgcttcccagaaaaaggactaccgtttcaaaatcggcacgattggggaaaagaagccggaggactggattgtggtggagggacagcatgaaccgctgattgaccgcatgagctttgacattgtgcagaacaagctgaaatcccgccagcgtccggggcagaccaatgaaatcagcctgtttgccggactgataaaatgcggtgagtgtgggaagtcactgacgatacgctacacaaacgcaaaacatccccagcagatttactcctgcaaaacctacaatgcctttggaaagaaccactgcacccagcaccggattgattatgacaccctttacagccatgtgctgcggaaaatccgggaatgtgccagagccgccctgatggacggggaagcggttgccgaccgcttgaccaatacctgtgaagccgagcagcgggaacagcgggaagcaatggaacgctccctcacaagggacgaggaacggattgaggttctggacaaaatgataatgcggctttatgaggatatgattgcagggcgtatcagtgaacagaatttcaacaccatgctggaaaagacacagaccgagcaagcggagcttaaagcaaaagtgtccgagggcagaaagcggctgtccgatgaagtccagcttgccaatgacgcaaaacaatgggtggaagccattcaggaatacgccaatatcacagagctggacgcagccaccctcaaccgcttaatcaaagaaatcgtcgtgcatgagcgcattgacgaagataaaacaagacacatttctatcgaaattcattttaatctcaaacccatcccagaggtggaacaggtcactgcctgacctgtcccgccgggacggttctcttaaaaacaccatatagattttttgtacgccgccgcccgccatcgagcagagttttacacctaattggggataaaacagctcatggcgggcggcggcatcatcgtgctgggcacgaccctgatccctctgctgtctaccctgttttaagggtagctgccgatgggtattctcaccgaatggatcacggaatggctcaaagggcttttgatcgagggcatcatgggcaacctcgaggggctgtttgacacggtgaatacccgcgtcggggaaatatccgtacaggtggggactaccccggcggcatggaacgccggggtgttctccctgatacggcagctttccgaaacggtgatattgccgattgccggattgatcctgacctttgttgccacctatgagctgatccagatgatactggaaaagaacaatatgcacgagttcgacgtggcgaatatctacaaatgggtattcaaaactacttgtgccatcctgatcctgtccaacacgttcaatatcgtcatggcggtctttgacgtgtcccaaagcgtgatcgcaagcgcggcgggcatcgtcacaggcgcaaccgacatcacgccggatatgctggctgatctggaaatgacccttgaaacgatggagcttggctccctgttgggcctgttcctgcaatcgttcctcattaagtttaccatgctggcgctgaacatttttatttttgtgatcgtatatggccgcatgatcgagatatatctgctgaccagtttagcccccatccccgttgccacactttcaaaccgggagcttggcacgatgggccagaattatctgcgctccctgtttgccgtgggctttcagggtatgttgatcctcgtctgcgtggctatctatgcggtactcattcaggggattgccacaggcggagatcccatcggcgcgatttggggctgcatcggctatacggtgcttttgtgcttcatgctgatgaaaaccgggacgatctccaaaagcatcttcagcgcccattgagaaaggaaaggtgatcttatcgctgataccgccgcttctggtcacggtggccagaagccgatcccggagggcctgcacctctccgacggcattgagggcctgcgctccctgccaaagcatagcgtggatatgctcttgaccgatccgccctacggcacgacccggaacttttgggatgtaccgctgccgctcccggagctgtgggatgcggtgaaatgggccgtcaaaccggagggcgcggtgctgtttttcgcacaatgcccctatgacaaggtactgggcgcgtccaacctcgccatgctccgctatgagtgggtatggtataaaagccgctgcacgggttttctcaatgcccgccgcgctccgctgaaaaagacggagaatattctggtgttctaccagaagtccccggcctacttcccgcagtttgaacagggcaagccgtacaagaaaatccaccgttgcagcggaaacagccccaactacggaaagtttgaacgcaccagcggcgagtccgatgggcggcgctttccggggaacgtgctggcgtttcccacggtgacaacaacggtacatcccacgcagaagcccgtggccctgtgcgagtacctgatccgcacctacacacgccccggcgaggtggtggcggacatctgcgctggctccggcacaactgccgtggccgcgctgaacacgggccgccgcttcatctgctttgaaactgccccggccttttacggccccgccacggagcgcatccggcgggcacaagaggctgtggcgtctggcaggaaaggagaatgatgacaggaacctacgagattatttacgctgatcccccgtggcgctactctgcaaagaaagtgcagggggcggcagaaaaccattaccccaccatgagcattgatgaattgtgtgcgctgcctgtggccgagcttgcggccaaggacagcgcccttttcatgtgggccacgttcccgcagctcccggaggccctgcggctcatccgtgcgtggggcttcacctataaaagcgtcgcttttgtctggctcaaaaagaacaaaaaggcggatagctggttttatgggctgggcttctggacgcgggccaacgccgaggtctgcctgctggcgaccaagggacacccaaagcggcaggccgccgatattcaccagtttatcatttcgcccatcgaaacccacagcaaaaagccggacgaaacgcgggacaagatcgttgccctcatgggcaacaggccccgcgtggagctgttcgcacggcagatctctcccggctgggacgtgtggggcaacgaggtggagccgacagcgggcctctggtcacggtggccagaagatagtggaaaggaggatgcttcttgccctatgtgaatgttcccaacgatctttccaagattaagacgaaaattgcctttaacctcacccgccgccagcttatctgcttcggcggcgcggctgccgtgggcatccccgtgtatctgctgacccgtcacgcgctgggcggcaccggggcgatgttcctgatgatcgcgctcatgctcccggcctttttcatggcgatgtatgagcgtgacggcctgccttttgaaaaggtagcccggaatatcatccgggccaagttcctgcggcccggtgtgaggccctatcagacgcagaatatctacgccccatttgcgggaaaggaggtcacacttgagcaaaagccccaagaagtcaaaaagcctgacgcgggccggtaatcgtccggcgaccatatcggcccagcagaccattccctatgtgcggatgctgccggacggcatttgtcagctccccggcggtgtctacacaaaaacgctggaatatgaggacatcaactattccgttgcgtccgccgaggatcagacggccattttcggcggctggagttcgtggctgaattattttgacagttcgctgccgttccagctttcctttgtcaaccgccgcagccgctccggaagccgctacaaggtgaatatctccgaggcgaatgaccgcttcaacagcgtccgcacggaatacacggggatgctgaaaaaccagatcgccaaaagcaacaacggtatcgaacgggccaagtacgtcaccttttgcatccccgctgaaaatgtggccgccgcacggccccgtctggaacgtgtagaggcggacgtgatcggcaacttcaagcggctgggggtacagagccagccccttgacgggcgggaacgtctggccctgctgcacggccagcttcaccccggcagccgggagccgttccgtttcaagtgggcggacatcgcccacacgggcatgggaacgaaagacttcatcgtgcctgacagctttgacttccggcagagccgctcgttccgcgtgggccagacatggggcgcggcgtcctatttgcagatcatggcgtcggagttgtcggacaagctgctgttggagattttggagctggatgctgagctgaccgtcaccatgcacattcagacggtggatcaggtcaaggccattaaaacggtcaagggtaaaatctccgacatcgacaagatgaaagtggaggagcagcgcaaggctacccgcgctggatatgaccctgacattcttccgcccgatcttgtcaccttttccaaggacgccgccgagctgctggctgacctgcaaagccgcaacgagcgaatgttcctcttgacgttcctgatcgtcaacaccgcccctacgcgggagcggctggaaaacgacattttcaccgtgaacggcatcgcgcagaaatataactgcgccgtcaagcggctggactggcagcaggagcagggctatatgtcctcgctggccctcggctacaacggcattgaaattcagcgcggcatgaccaccagctccacggccatcttcgtcccctttatgacgcgggagcttcgcatggatggcccgtccctctactacggcatgaacgccctgtcccataacgtcatcatggctgaccgcaaaaagctgaaatccgccaacggtctttacctcggctccacgggcagcggcaagagctttgccgccaagcgtgaattgctgaacgtctttcttgccatcccgcaggatcgcatcatcgtggtagacccgatgggcgaatatgccccgctggtggagcggctgggcggtcaggtcatcgagatcgcgccggacagccccaaccacatttccccgatggatgttcagatggacatgggcggcggggacagccccctgtccctgaaagcggattttctgctgtcgctgtgtgagctggtggtgggaggccgggatggtttgcagcccatcgagaaaaccgtcattgaccgctgtgtgcgtcaggcgtaccgggaaatggcgctggggctggaaacggccaaaacgccgctgctccaagatttgtatgaggagctgctgcgccagccggagccggaggccaagcggatcgccacagcgctggagctatactgcacaggctccctcaacctctttaaccatcctaccaacgtcaacctcaattcccgcgtggtgtgctttgtgctgaaaggcatgggcgaaaacctccgcaagattgccatgcacatcaccaacgattttgtcacctctgcggtgggaatcaacttcaaaaacggcgtggcgacatggtgctattttgacgagttccatattctgctccgtgatccgctgaccgccagctacttcgtgaccgtctggaagatgctccgcaaacagggctgcgtcccctcggccctgacgcagaacgtgaaagacctactggccagccgggagatcgagaacattctggacaacacggattttatgatcctgctgtcgcaggcgcagagtgaccgcaccattcttgccaagcagatcggcatttcagagcaccagctatcgtatatcacgcagtccaactccggcgagggcctgctgttctatggcagcgtcaccatcccgtttgttgaccgcttcccccgtggcgagatctacgacctgctgaccaccaagccggaggacgctgccaatggaaaacaggcagaataagccgcccaagggcggggctgcttctggtcacggtggccagaagttccatactgacagcgaacaggccaagctccacaagtccaagctccgcatggagagccgggaggaacggctgaacaaggcccgtgaaaggctggcaaagcagaagccgccgaaaaagcccggccccatcaagcggatcgcccggatcgccggacacaaaacccacgcttttctgcacggaaaagtgtatcaggaggagcgcgacaatgtaggtgtggagggcggtcattttgtggagcgttccggcgaggccgcgctgcactatgggcggcacaaggtacgcagggtcatccgggagcacccggccaaagctgccgcccgtgcggagtcccggtacatcaaggccacggcggactaccattcccgcaagttcgcacaggagcagccggaggcgcaaagcgccgccgcccggttatggcaccgccacaagctgaaacgggagtatcagcgcaaggcgcgggaaaccgccaagcagaccgccaaggctgccgaacaaaccgcgtcagccacggagcggtttgtccgggaagcggcggcgttcgtcaagcggcatcccgtggggacgctgcttgcgctgggctgtctgctggtggtgctgaccctgcaatcgtgtatgtcctcgatggtgtccgtgggaaacagcacccttgcggccatcgccgccagcacctataaggcggaggacgcggatatgctgggagccgaggccgcctactgcgctctggaggacgagctgcaacgctacctcgacacctacacccgcacccacgattacgacgaataccattttgacctcgacaccattgaacacgatccctatgtactgatctccatgatctccgcactccatgagggcgcgtggacattggacgaggtgcgcgggacgctgcaagacctctttgaccgccagtacattttgaccgaggatgtggtggtggaggtgcgctaccgtaccgttacccggacggacagcgagggcaacgactatgaggtggaggtgccgtacaactattacatctgctatgtcacgctggaaaacttcaatctctcccacgtcccggtttacatgatgtccgaggagcagctttccatgtacgccctgtatatgtccacgctgggaaaccggcctgatctgttcccctcgtccggctatattgggaaatacatcaccaaccgcccaccggagcatgaagtcccggagtcctatctggacgatgaaacctttgccgccattctgaaagaagcggaaaagtatctcggtttcccctatgtgtggggcggcagcagtccgtccacatcctttgactgctccggcttcgtcagctatgtctacaatcaatgcggctggagcttcgggcggctgggggcgcagggcctttataacatctgctcccgaacgagcggcccccgccccggtgatctggtgttctttgtcggcacctatgacacagcgggtatttctcatgtgggcatctatgtgggtgacggctggatgctccattgtggcgaccctatcagctatgccaacctgaacagcagctattggcagtcccatctttacgcctacgggcgactaccgtaaaggagatttttgatatggcaattacgaaaagcgcgaaaatcgaggccgagattgaaaaggtcaaggccaaaattgccgagcagcaggcacggcttaaagaattggagcagaaaaagctggaggcggaaaacagtgagatcgtggagatcgtgcgcggcatgagtatctcccttgccgatctgccgctggtgctccagcagctccggagcggcgcttctggtcacagtggccagaagccgacggaacagacggaggtgacggaatgaaaaaactgcggcttttgctgataacgctttgtgtgtccgtcctcatgggtagtatggcggtcacggcctacgccgggggcggtgaggaatgggacggccttgacccggtggagccgctgcccgccgaaaccgttgaccccggcgagggctttaccgaggatggaaaccttgtgacccgtgatctgctctacgataaggccaccaacaagcagttcatcacggtgcagaccagcggcggcaacaccttttacatcgtcattgactatgacaagcccaccgatgaggacggcgagcagtatcagacctattttctgaacatggtggacgaggccgacctgctggcggcgatgcaggcggcgggcggcgaactgccggagtgttcctgcaccgacaaatgtgccgtgggtgccatcaacacggattgcgctgtctgcgccgtgaatatgagcgagtgccagggcaaggccccggagcctgcgcctgtggtagagctggagcctgaccccgagctggagcagccaaaggccacgggcagcggcggtatgcttctgctggcgctggccgtggtggtcattggcggcggcgctggctggtacttcaaaatctaccgtcccaagaagcagcgggccgctgagtctgaggcggactacggcggcgagtatgacggcgcggaggattatgacgaaaccgatcctgaggatgacgggccgccgtgggacgaggacggtgaagaatgaggtttaccaacagcccctatgaggactttatgaaagaaaagagctacttcaagggcgtctcgcccaacctgccgcccaaaggctcccgctgtgacggctgcccctattggcatgggatcggctgcgtgttctgctaccgggagcagctcagggtaaagacagggggcaaaaatgaaccgtgaattgacccggcaggaaaaggcggcgatccgctcccttgtgaagcggtggtgtgccaactatgacaaagacattggctgtctgccgctggattgcgagtgctatatgctggggaaatgctggacgggcgcttattgccgctatttccgttcggcggtgctgccccttgatcccgtgctggaaaggtcgctgaccgtggagaccgtggcggaaacccggccctgcccggtgtgcggcagggctttcctcccggacgggcggcagcggtattgctccccgacctgcgcccgtgctgcaaggcggcagaagcagcgcggctatatgcggaaataccgggggtaggctgtgagcatttgaccccggaaaccccccttaattgtagggctttccggggccgcttcatgggcggggcgtatgatttcatagccccgcccggttttgcagagatattgctaacattttggaaaggaggtcgtatggacaaaaaccaaggctatgagatcattcaggccgtcatgctggaaaatggcaggggctttgcgctggggcatcatcctaccgctccctcgccctatgtcacatgggcttgctatgacgacaaggacggccagcggcagtatgaatgggggcattacggcagcgaccgtgccgctctggaacaggactttgcggcgcgggtgcaggaataccagcgcctttacaacgtcgatgtcaggcaggtcgaggctcccggcctttacaagtattactctacccagcgccctgtggacattgggacattccccaagccgccccgcaacgctccggatgagattgtcaactacgatcagcgcgtcccggttgaaaatggatcatttctggcgtgggggcatttgacctacacacggccattgacgaaacggcaggcgtctgactatgagctgcggcctgcgcctgacaatcccgacaggccccgttcgatccgggaacagatgaaaaccgccgcaaagcaggccgaggctgaccggggccaagctgccccaaagaaaaatgcccctgaccggggcgacagataggaggacatttatggatcaggaacgcaatcccaacaagaacgccgagctttctatggagcagaactataatcagattgacggcatcatcaacaatctgcctgtgccgcccccggaggataagccgctggacaaagtacgggaacatccgcccaagcgccgcagccgggagcgtgaggagcgttgacaaagaagcgcgtccgcagcgtccccatctatgtgtgggtacggcctgacgagctggaggtcattcgggagcgcatggccgaggcgggcatccgcaacatgagcgcctatatccgaaaaatggcgctgggcggctatgtgctccacgttgaccttgaacccgtcaaggagcttgtgtcgctccagcggcgctgtgcaaacaatctcaatcaggcggccatccatgccaacagctatggcggcttgtacccggacgagctgaagcgtctgcaaaaggactatgccgatctgtgggggccgctgtctgatctgctggcccagctctccgccattgtaacgatgtgacacagggggaacggcctcgcgccgttccccggctgtccgcacctctggtcatcgtgaccagaagtgcggagggccgggacatccttgagtgacgattttttcagagttataatagacatatacaggaaaaaggaggaaccccctatgcggattatattcaaaatccttgccgctccctttgtgctggtgctgaccctgcttgtggccgtgctctcgttcctgctgagtctttccgctggtttgctctccatcctcgcgtcggtgctggggctgctgagtgtcctgatgctgtttgtggagaaagacatttccacggggatcgcggggctgctgatggcgtttgccatttcaccctttggcctgcctgcgctggccggatggctgcttgccaagctggacgagctgaacggctccctgcggggcttcatcatgggctgagttctggtcacggtggccagaagatgcagaaacggcggctgatcccagccgctgtttgtcgcatggaaaggagggctgcctacggccacaacctacctcaaatcccacaagcaggccgataagcggacggccctgcaaagcctgaaagaccgctttggctatggcctgaacccggagaagctgggggccgtttcctcctacctctgcgatccggccacagcacacgccgagttcatgctggtcaaaaatcagtatcagggggaaactgaccgcatggccggacacggggcgctgtgctaccagatccggcaggcgttcccccacggcgaggtgacgccggaggaggccaaccgcatcggctatgaaacggcgatgcgctggacaaagggcaagtatcaattcttcgtctgtacccatatagacaaggagcacattcacaatcacatttactacaattccaccgcctatgaccgctcccggaagttccgcaacttcatcggctcctcgttcgccctgcggcggctgtctgaccgggtatgtctggagcacgatctgtccgtgattgcaaatcccaagctccacagcaaggggcggtatctgcactacggtcaatggctgggggaaaatcaaaagctctcacagaaagaacagatccgccttgccattgacgcggccctgacggagcgtcccaaggacttcgcagattttctccggcgcatggaaacggcaggcatacaggtcaagcgcgggcgcggcggcgcgatctcattccttgtgccagggcaacagcgggcggcccgtttccgggcatccacgctgggggacggctacggccccgaggacgtacaggccgtcattgacggcaaggctcccacacgaacggccacggcgcggaaagcgcccgcaccccgccgtgtcaatctgctgatcgatattcaggagaggatgcgtcagggcaaaggccccgcctatgaacgctgggccaaggtgtataacctcaaacagatggctgccgcgctgcaatatctgaaagagcaccagctatttgaatatgacgatttggccgtaaagaccgacgctgccacggaacggtttcacacgctggctggggacattcagcagaccgaggccgagctttcccgtgtgtccgatctgatggccgccgtggtgcagtacgcaaagacccgccctgcgttcgatgggtacaaggccgccaagtacaaccggaaataccttgccgagcatgaggcggagctggccgactaccgggcagccaaggcgacaatggccgagctgctgggcggcgagaagctccccaaaatggacgtactaaaagaaaaacgccgccaactggcagcgcggaaaaaggctctttatttggaataccgcaaggcccagcaggatatgcgggagctggtggcagtcaagggcagcgtggatcacctgcgcgggctgacggacagccagcgaaataaggagcaggcccgttagggacggcgacgcagacaacatttcttctggtcacgatggccagaagtccagcgggtttgggggcaccccaacaagcatttccgcagcgcggaaattgcaagtgtcaatacacttgccttgcttgccatttagcggcaccccaaaaaagccccctaaaaacgaaggctcttttacttgacctccgtttctctggcgttcttcaatgcttgtattgtagcttcaacaacttgtaaatccttttcatccagtgagttcagcatagcgttgatccgctttctacaactgctcgctgtatttttggacggataaaagtattggtctacggatatgtcaaacatcgtgaccagttgataaaaagtattgaggctgggatgctggccgtcattttcgttatacatgatcgtccgtggagaacggtcaacaatataagccagttgctcctgtgtcatgccgctggcttcacgggctcgcttgatggcaagccctatatcgtggaaatcaaatcgtcgttcatctcgctctatcttcataatatcacctaatgtaattttacatttcaggtcatagtatttgaacgacttttgttttcatactgccgactatttaatttcatatctctgtcattttgtatctcagtagcctaaaagtgcaactcatgtttgacaatattgaaaaacacgaaaattcccatataatagccataagggggtgatttaacttgaaaattaggatcaatgacaggccagatattcaagaaatcgaagtcatcattaactgtgtggccgatgatccgcttgtcaataaaatcatatccgcattaaatacagttgatgccaaacttctttgccgtcggcaaggagaaacattccagcttggtttagcagatattttatatattgagtccgtggatagaaagacttttctttatacagaggagcaggtgtacgaaacagatagacgattatatgagttggaggactatctgaaagaccattctttttttcggacatctaagacaacgatcatcaatctacggcgaacaaaatcaattcggccagagattggggccagacttttgctcactatggataatcaggaaaaaattattgtatcacgccaatatgctggaagcattaaacacgctttgggggtgaaataaatgaaacaatatttcggtgcgatcttgcgttttttcaaggctgttttctttacttttggattgcttatattcctattttgcgttcggagatatttacccggttttaatggcagtcagggggtcggtctggttgaattgcgcctttgtctggctatggcagttgttttttctatggcacacactataatcacctcggatcgtgtgcctatccggattagtttgattgcaaccggcgttcttagctcaattacctgcggtgtactgtcggtctattcaggtattccatctgctatcataaggtggttcgatattacagacaccacagtagcaattctttcgtggtgggctggctttttcatctgcttcgtagtattgttattcatttattttgttgtggagcgttattatcgccatttggagtatcactataatgaggctctcgccaagtacaaagaaagtagtggtaaaacaaaatgaaactgaaagtcaaagatattagtaagaattataaccgatattccgctctgcgtggggtcaatctggaattagaacccggcctttatggactgctggggccaaacggggcaggaaaatccactctgctaaaaatcatagctggtattcttcggcctactgctggcagcatacttttggacaacgagccagtatcgaaacttggggagcactatcgtgccatgctgggctatatgccgcaagacctgggaatttaccctgagtttaccgcgaaacgatatttgctttatattgccgctttgaaaggactgacagaggctcaggccaaggcggagatcgataagctgttggaggccgtagggctttcctcgaatgcagagcaaaagctaaagggcttttccgggggaatgcttcgtcgtgttggaattgctcaaaccctgctttgtaatccgcaaatcctattgctggacgagcctactgctggtttagatccacaggagcgtgtacggctacgaaatcttttgtcagcgttagcccaacacagtattattattttgtccactcacatcgtttctgatgttgaactgatcgcagaaaaaataattttgcttcgagaagggcaaatagcggcctttgatacggttgctggccttgtggggaagtcaaccttggaagatgtgtatctgacctattttcaaaaggaggcgtaatatgcggttgctcacaaaattagagcttgataagctcatacgccggaaatacctgttgcttggtagtctgctcctgttggggtactcctcatttatgtttttttcctgttgcatgaactcatcccccacctttccagtggaaactgctgacggtgtggaagtaacagggcgtgcggcggcactttacaacaagtccgtttatgagcaatacgcaggagaattgacagacgaggccgttgctcatgtgttggatgactttgtagatttgcgggatgctcatggggaacattcgtttaactggcctgtcatttatgacaatttctcaatttttcgagctgctgatcaggctgaccgtgagcgttcagaatatggatatatcagcgttgctgatgcgggagtcctatcctttcattcgcctttagtcttttcttttgattatacttggcagactgcttttaacattctgtttaactcgaatgtagtatttgccatttttcttctgatcgtgttggcccctgtcttttctgaggagtacagtagcggtgcggcaaatgtcattctctccactcgttatggaaagagcaaggtgatacaagcaaaatttaccgccgcttttttaattgcagccatcagcgcagttatattttgtgtggtcatccttttagcctgtggagcctattttgctgggttcgagggttggaatgcggatattcaaacgcagtttatgtcaaatcaatcgcaaatccccatccgtatgaacaacttgcagtttttccttgttgttatgcttttctattggctatccgctgttggaactgctgtgctggcctgttgctgttcggctctatgcaagaagtcactcatagcgttgattatgagcggtgtgctctatttccttccctatttcccgatgaagttaggcggtgtacttggtgagtggatgttcatattccccatttggtctgcaaaagcacaatgggtattgagaaccgcagaacataagttagtcaacctattgccgctctcctgtgaaatgcctgtttggattgtaatatttacgctgattttcacagtagtatcgtttctaatcacttgtaaatcgttttcagaatatcaaggaacataagccctttaataacagaacaatctgccggacgacggcaaaagaaaaaaagccgtcgcaacgcagacataatttcatgcgcccaagaagcggcggcccgattttcagagccgccgcttctcttgttacctacaaaataaagccatgagtacggcggcacataggaggatgccgccgtgttcatttttgcttttcacagtacccatgatctgcatcagttaaaaaaagcgtagctccccctccgggttattccggctatggatgcgaaatatggcagtatattaaggaaaacgtattttcatgcgctcgtatggctttatgctgtgcgggcgcttttatatatcctccccctcgcttctggtcacgatggccagaggcgccaaggtgccgggggccgcctgttctccatttcaatccgcactcaccaaccaccttttgaaatggaggacaattatgacgactatcaatctgaaacggtattacccctatatgaccgaaaatgtgatgctggaagtttcggacgagatcgccgccaccctctctatgggaggccgcctgtgcgacagctacaaacgacagaagcgcagaaatggcgagtgctcgctggacaccgatcccggctttgaggccgacgtgctccgccagcccatgaccccggacgagtacattgaggcacgggaaaccacctttgccctctatgacgcgctggcccagctcccgcctacgcaggcccggcgtgtgtaccagcattatcttctcggcatgagcaaggccgagatcgcggcagccgagggcgttggccggagccgcatctgctgctccattgagcgcgggctggccgctatgaaaaatattttgaaaaaatctctgtaagagggagtacatttgcccccgaaacctcctgataggtgagaggagttttcttcctcgccttgaaaactgaatagacagtattcccgatacgaaatccgcgtgatagcgacgtaaggtgcgccgccacgacagccagttcaggaggtgatgggcaagctggccgagcgatcaacgcagcctttgacccggtgctggcaaaccgggcgcgaggacagcgcggaggataatgaaacttgctcacgccctcccacagacttgagggggagcccctgcggtatgcgccagccctccacgggcagcggtactgtggggctatgcagccgaagccatcggcggtctggaatactccccgtgccggggatgcgtggcaaatacggcacacaacaatcatacagggagccgtccaaccgggtctttctgtcttatgacagcccaaaccattccggcgcggcggctccctcttttgtggattgaaacggaaaacaactgtcccgctgcttctggtcatcgtggccagaggtggggcaaggtcaaaggacggcgcttttgtgccgtcctttcacgtttccccacggacaacgggaaaccatcaaatttattcacaccgctgattattataggaggttttcagatgacggaggcaagagtcggctatcacaaggaagtcaaaaccgcgtcttttcagggcaaatccatcaccgtggaaaacctgaccccgatgctctctccccgagcacgggataagcgcaagcgtgagattgaaagctgtctgtatgaggtctttgtgaagtatgcgccgggacgggcgcagatgcactaatgcgggacatccttgagatgcggggctgccagaggtataatataggtgtaaggtttggtagctcctacacggaaaggagcaccaaatgattattcgtgaagatgccatttatggcagacagtccgttgaccgcaaggacagtatcagcattgaaagccagattgagttctgcaagtatgaattgagaggaggcaatttccgcaagtacaccgacaagggctattccggcaagaataccgacaggcccaagttccaagaaatgatggccgatattcgccggggcctgatcaagcgcgtagtggtctacaagctggatcgtatcagccgttccattctggacttcgcaaccatgatggaaacttttcaggaatacaatgttgagttcgtatcttccacggagaagtttgacacgtccaccccgatggggcgggccatgctgaatatctgcattgtgttcgcccagcttgaacgtgaaaccatccagaagcgcgtgaccgatgcctactattcccgctgccagcacggttttcacatgagcggcgcggccccctacggcttccaactggagccgaccaccattgagggcatccgcacaaaaatgatgaagcctgacccggaaacggcagatattgcaaagctgatgtttgaaatgtactctcagcccgcaacctctttcggggacatcgcccgttactttgccgacgagggcatcctgatctacggcaaggaaatgacacggggctttatctcccagcttttgagaaatcccatttacgcgcaggccgacctcgatatgtacgagttcttcaaaagtcaggggacggtggtagtcaatgaagcgacagattttgccggaacaaacggctgctatctctatcagggccgggatgtgcaggaaagaaaaaacaagcacctgaaagatcagatacttgttcttgctcccagcgaggggctggtatcgtctgatacatggctgcgctgccggaagaagctcatggcgaacaagacgttccaaggcgggcgaaaggcaaagaacacatggcttgccggaaaggtcaagtgtggccgctgcggatacgcgcttatgagcgtcggcaatccgacaggcgttcagtatctccgctgctccaagcgggccgacagtaaaagctgtgacggctgcgggacgctccgtacacgggaatttgaaaggttcctgtacggcgaaatggtcaagaagctgtccgagttccagacgctgacggcaaagcgggaaacggtcaatcccaaattgaccgcgctgaacatggagcttgcccgcgtggaggaggagattgaaaaactgctgaatactctgaccggggctaatgctgtgctgctgtcctatgccaacagcaaaatcgaggagctggacacacaccgccaagccttgacaaaagagatcgcggcgctgtcggcggaaatcatgtccccggagcagatcgagcggctgtcggtctacctcaaccaatgggaagaaattgactttgaggacaggcggcaggttgccgacggcctgatctcacagatccgcgcaaccgacgaacacgtttcgattgagtggaaaatttgacttttacttatccatcgcacacgacaaagggctgtgtgcccttgtcaagcgatgtaagtataactacttagatattgcgagatcggggaccaatctctctgctgaaactaaagaagtgtatcgaattccgttttcaattgataacaaatattatgaactgaaatacattattgggcatcagcagcagttagggcttttagaaagtttcgaaatgtctggaaaagctgttgtttcgttgaattctactgacataaaagaatgctataaaatcgtcatattacttgagaggttcatgaagtttatttctaactcatcggatgtatactttcgacgtattacttttactgatggagtacgtcctgcagcattcttttattgtaaatctgtttccgaaaaatcatcagggggaatggatgttttttatcatgatttcaatgtgatgaaatatgttccgaaaatcattgaaaatcttgcaaaggaacttggaaatagaattactgaaagtgtgacattgggacacattgaaaattacgaatcgatgtttactccccaacgcttcattgagcaaatcatggcgtttgaatacttgtttgaaaaattagaacccgaaaaggccaagcagcgaaatttccacttgattgatgaattggaactgatgctcggagtttttccagatgttattgctggagttcgtaaaagcacccgtaaaattgcggacgaaatcaaaaacttacgggtagatattgtacatgggcatgcatactattacgattttgccaatgatcacaatattcagtattatatgctaatgcttgataagttgattgaacgcatgaacttaaagcttgtaggttttaacgatgaggaaataaagactttttgctcttattaatggttgcttactattttctgcgctcatgcaatagaagtggccggtgacaaacatgaatcattaaaaggggcctcaccccctgcgccgcaatagacaaagaataagaaaatccctctgaaatcattgatttcagagggattttggtccgagtagagcgattcgaacgctcggcctcttgaacccaaatcaagcgcgctaccaactgcgctatacccggatatttgattttgaaccattatagcacaaaatttgtgcgattgaaagatttttccgtctgtggtcattcctgtggtcaaagccacttttgtgccgttttcggcaaccgggggaaatccagcaaacgcaggtgtcgcaaggctttgcggcgtttcgcctcaccctatcccggataccgccacggcacgccccaaaccaggcgcgataccaacttcgctatacccggatattcaatttctgccatgataccacggcgaacggtaaaaataaagttttttctgtctgtggtcattcctgtggtcaaagccgcttttatggcactttcggcaatcgggggaaatcccgcaaatgcaggtgtcacaaggctttccggcgtttcgccttgccccgccccggataccgccacggcactcccaaaccacccgcgctaccaactgcgctaatcccggatttttggttattgagttttacgccaactgtggtcaaatatgtggtcacggcgattttttgaccaccttagcttgcgggggaagtgcctttatcgcaggcgtatcaagggattgcgggcacggtattttccggcttgaagggggagcgacccgctcccaaaccaggcgcgataccaacttcgctatacccggatactattgatacttgaatagggcttcgatttgaagccctattattataccgcctgctctgcgcggttgcaagggttatttgcggtgcgcggagcgtttttcggcatccttggggcgcgtgcccttcatcgcctcgtgttcctgacggagctcgtcgtgcagctggagcgaactccacgcggcattgtcctcggtgacgacggccttgagcgcgacgaccacgcggctgcggcgaagagacgagagcagcgcgtcgagctgcggaccggaaagaccgcagagtacgagcatctcgtcggaaaagccgccctcgacggtttcctcgacaggggagaagccctcaagatcgcagagatagccgatcggctgcgaaagctcctccggcgcgacgatgcgcccgctcacaccgagcttgaagagcgcgaagcggaccttttgcagccgtgcggcgtccttgaaattgtaaagcagtgcacatgccatggtcaaaccctcctcagcggtgctgcgcggccttctgtgccatgatatcggggtcgatgcagaaataggtgaactcgcccgtggcgaggagcttgccgccctcgcctaaaatgtccacgttgacaaggcaggtcgttctgccgcggtggcggactttggcgtccgcgcgcacgacgccctccgactggttgcggagaaaatgcatcgagctgccctgcgtcacgtaggatcgaccatccgtgtgggcggcgtagcccgtggcgttgtcggccatcgtgtagatcgcgccgccgtgcacgataccgtagggattcttgctctcggggcggatctcaagcttgaagatcgcgtggtcgggctcgacaaattccgcttcaatgtgattataggtggcaaaaagattcttcttgttcaattccgccgcctgctgggcggctgtgagctgttccatgaaagtgctcctttgacattgttactgtcgtatcctaccacagcgcggcgacaaaagcaacaatgcggtgaaaaacatcgaatcagtaaaaattgacagaaaaatgcggatttgtataacattgtcattttagatgccaaaagtgaaaaaactcgtatcgcttgaccacttccattttgcttgaaagcctgctatactacctttaccatagaaaaatatgcgtttgaagggaaattccctatgatatatgagagtagtgcatcctcccgctgtgccgcggggccgaagatcgccgccatcggcggcggcacgggtctgtcgacgatgctgcggggattgaaaaaatatacagaccgcttaacggctattgtcacggtggcggacgacggcggcgggagcggcgtgctgcgccgtgaaatgggtattctgccgccgggcgacgtgcggcaatgtatgcaggcgctcgcgaacaccgagcctgtgatggagcagcttctcggctatcgctttcccgagggacagctcaaggggcagtcgttcggaaacctgctgcttgcggcgctcaacggcatggcggggagctttgaagaggccgtcgccatgatgggacaggtattggcgatctcgggccgcgtgctgccggtgacgaacgcggatgtacagctcgaggccgtgtttgaaaacggcgcgcgcgtcgtgggcgaatcgcacatcttcaacgcgaaaaagcagcaggactgccgcattgaccatgtttcgctcgtgccggagcacccgaaggcgctgcctgacgcgcttgaggccatttcagaggccgacctcattctgctcggcccgggaagcctctatacaagcgtgatcccgaatctgcttgtcaacggcgtggccgacgccatccgcgcatcccacgcgcagaagttttacatctgcaacatcatgacgcaggacggcgagaccgagggttacaccgccgccgatcatctggaagccctgcagcgtcacgggcggaaggggatcgtggacctctgccttgccaataacgcgcccatcccgcatgagctcgccgcgcgatacagcgaagaggacgcggagctgctgcgcatcgaccgcgagcgcatcgcggcgctgggaatcgcgctcgcggaatacccgctgctctcggcgcagggaggctacgcccgccatgaccctgagcttctggcgcgggcggtcatggagctgtatcgcgagcgcacggtgcgcatctaccgcggcacccagcagtacattacggaagaacaggagaggagataatgctcaacagtaaggaatttgtcagggaattgcagctgcgccacgagagcgcatggatgaacccgaatctcgagagcgcggacgccgcactcgctgcgctgccgctcacgcgcacggacgtcgacgatgccgaggcgcggctggagcgcttcgctccgttcatcaaaaaggtatttcccgagaccgcggctgatcgcggcctcatcgaatcgccgctgacggaaattgaaaacatgcgcgtgtggctcaatgaaaatgagggcgcgcagcttgcaggcaagctcttcttgaaacgcgacagcgacctgcccgtcgcgggcagcgttaaggcgcgcggcggttgctacgcggtgctcaagcacacggaggacttagcgcttgcgaaccggttggtcgaaacgcgagacgactacagcgtgtttgccacgcgcgcgttccgcgactttttctcgcagtatgagctgcacgtcggttcgacgggcaatctggggctgagcatcggcatcatgggcgcggcgctcggctacagggtcacggtccacatgagcgcggacgcgcggcagtggaaaaaggacctgctgcgcgcaaagggcgtaacggtgctcgaatacggcgcggactactcctacgccgtgcagaagggccgcgagcgcgcggcggaggacccgagaagctattttatcgacgatgaaaactctgtcgacctcttcctcggctacgctgtggccgcgcggcggctcaaggcgcagctcgccgagcagaacatcgcggtcgacgacgagcacccgctgctcgtttacattccctgcggcgtcggcggcgcgccgggcggtatctgcttcggcttaaagcaggagttcggcgacgcggcacacgtctacttcgctgagccagtggaagcgccgtgcatgctgctcggcctcgccagtggcttacagaatgcgatctgcgtgcaggatattggcctgacgggccacactgcggcggacggcctcgccgtcagccgcccctcaagatttgtaggggagacggtcaaggcgttggtcggtggcggtttcacggtgtcggacgagcatctgttcgccgaccttcacgccctgcgcgagatggagggactttttgtcgagccgtccgcttgtgcgggctttgccggtgcggtggagctgtccaagatgacggattatctcgaaagcagcggccttggcgcgcactgggagaatgccgcgcacatcgtctgggcgacgggcggcgcgctcgtgccggaaggcgaacgcgaaaagtacctcgcaaactgaaaagagataaaagaaggacttcacgcattgcgtgaagtccttcttttttgcgccgcggcggggaggggaaccccgttacgcgggcgtcatcgtcagggtatagttcgccgtgcggatcacgatctgtgttacgacgctcttcgctgtgtcgacgctgagctcggcggtgtagccggtgaagctgtcctccgcataggagacgtgcagcgtccaggtctccgcactgcccgcagcggcggtgcgcttgaagtccgtgatgtgtttgctgcgcgcacctgtgaactggcagtcaaggaagcatttgccgatgtagctattctccgcccatacagccacctcggcataaatcggatagccaacatcacctagttccgggctgttgccagagatgccaatctgttcatcgcttgcaaagccgcccttgacagcataataatttgcaaaaaaactgacaccgttattaaagaacgggaacggctcggcagtaaatttcacggtggtgacatccggtgtgctgctgacgtcgagcgcggcgtcgaagctcgtctttttgccgccgccttcgagcatgccgcggtatttgccgcccgcgaggtagctgttattgaggatcgtgagcgccttatcgagcgcggcgttgccggtgtcgggatcggtcggcaggcgggcgggagcggtggtcgtgtcaatacgcagaccgttttcagcgtcccactgatagctccaaccgaacgaatcgaccgcgtaggcccaggtgagggggaaataggtgatgccgttataattgaaaatgggatacttttcttccttgttattgatctgtgcgccgttgacgctaatcttgtagcttgccggtgtgacggcgacactgccgcgctgcgccttgccagtctcggcaacataggcgctctgcgcgccgcctgcggtgatattgagcgacttggcgacattgttccagttggtctccacgcccatgaaacggcttaattgatacgtcatgggaaagtaagtgatgttgctataggtcagcagcgggtacttggcgttcttgttgtcgatgacctggccgttgagcgacaccttgccggtgacgacgtcggcgcgcattgcggcctcggcctgcggcagcagactgaacgcgagcgcgatgcagcaggcgatggcaagcagggcgcgcagaaaagtcttgttgatggtagacataacatactcctttccgttttgtgatggttgacgtttactcgtacagcttggcgctgcggttgaggtacacgagctctatgatctcgaccacgcccagaccgatggcaatggcgagaatgagcagcagcaggacggtcaggctgccgttgtaaaaatagaagaaggaagccgacgacagacacaaaagcaggatcagaatgagaaatgcgccgagagcgccgatgaccacgacctgccaggtgcagagtgaacgccattttgccgccatcgcgtcgtctgcgccgtcaaacgcttcggcgcaggcggtgagctggtggtacgccgcaagtgtggcaaacaggaagatcaatcccagcagaatgatcagaacgaccagaatcgcggagacgtccgatgccgttatccactcctgtacgcttggcgcatcgagaagcgcaacgaacggcagcgcgatcagcggcagaagattaaagtacacggccttgcggaagcgggggacggccgcgctcagcttccagagcacaacgagcgcgagaatgctgaccgcaaacgacatcgcactcagtacaacgccgagcgacgggatcttgtcgccgagcttaaaggtgttgttcaaaagattgatgacgatattggcgatgccgaggcggaagaggttctggaaccccttgtgcagcagcggcgcgtttggcctctcgcgcagggggatgaccggcggcgcgggcgggggagtgacagcgctctctgcgggggcgggaacggcgacgggggaaacttcggggacaggtgcgggacttggcgtctggttattttccatcatggcgggtctcctttcttgttctctcgctttttatttctctctcaatttgaaatacggtcacgctcactggaagcggtatccctgcgcggtaagggaggcaaggtagttcataaagttttcgtactgctcaaagtgcagcaggtcgcttgcctcgacctcatggaacgaggcgattttagtggaggtatccacccacacaagataatcgttcacggtttcgcctcctcgtcggggagcttttccccctctatgtcatcaaaggtgagaatattctcgttttcatcgtcgtcggaaaggtcgacggtcttctccgtgaccgccacgctctcggccagagcgcgcagggcggcttcatcgccgctggcatcgagtgagaagtggagattgctctcctcgtcgatccactcgagcgtgctccacagcgactcatcgctcgcaaggaaaaacttgcccttgcagccgttgacggtgacctcggaaatttcggtgtcctcgcccatgtcgtaatagctgaacgaatcgtcctgcatgtagatatagctgaaaaggatgaggtcgttaccgctccgatagcagagctgacggaagccggagtcctcgtagctcatatcttcgtccagcgtgtaaccgtccggcagggcggtgatcgcgtagaacggcagctcaccggtgggggcgtcgcccgcgtattcataggagacctgcgagcccgtccacgtttccacccagtggatcatagcggcccgcgcggcgggactggcggcggcaaagccgttgagcgcgagcagagcgaccagagcgaccatggccgcgcgcttggcgagcttgctccagaagctccgctgcgcggggcgcttgtaggtcagggcctcttcgacgtatttcgcgccgatctcgttcatggcgtcggaaaaaagctcgggcgtcataccagcacctcctgttcggtcagataggtcttgagctgcttgcgcatacgcgtcaggcgcaggcgggcgttgccctcggtgatgccgaggagcttgccgatctcggcaaagctgtcggcgtaccagtagcggcgcataaagagcacacggttttccttgctctgcgtgtcaagaaagcgctcgattgcggcggcgagctctctggccgcatagtgctcctccatcgcctgctggggcgaagcaagaaacgtttcaagctcctccatgcacatatcgtaatggctgtttcgtttcattgccgtgttggcacgatagcgcgtgatcgaacagcggcggacgagcgtgccgacaaacgccggaagcgactccggacgctgcggcgggatcgcgttccaggtgcttaagtacgcatcgttcacgcactcctccgcatcctgcgcgcttgcaaggatgttgtccgcgagcttgtggcagagcttgccgtatttcttgtccagctcgctgatggcatcctccgagcgcgcaaagaacagctcgatgatctgcgcgtcttccatcgtgcagcgcctcctttcctcatgaaaaagtgtttctacctcaatagacgcaatttccggcaaaatgcttcacgaaaccgtaaaatttttttatttttcctttttgacggaaaaaccggatgatttgttcctgcgcggcgggagaaaaagggaagatatcgacaaaattttacctaatagataagaaaacggccccatgccgaaagcatggggccgttgatcctgcattcaaaggtgcagccttgcgtgctcgcagatcgcgtcgtatgtctgctggctgatgtcgtgctcgatcttgcacgcatcctcctcagcggtcttttcgtccacgccgagggcgatgagaaattttgtgagcgtgtggtggcggtcgagcatctttgctgcgatcgccatgccgcggtctgtcagcgtgatgaggccgtcgcggtccatctcgatatatccgttttcgcgcaggcgcttggtcgcgtaggtgacgctgggcttcgtcacgcccagatggtcggccacgtcgatcgaacggatatagccgtgctgctctttcatcatcagcatggattcgagataatcttcagatgccttttggattttcatgtgcggtttcaccaacttcgcaataaagtacgataataggttaacatgctctaacaaaaaatgcaagcattaaaaaaatgttcacaaaacctcttgacaaaataggttagagagattaaactaacgggcgaaagttaaacggcactaacttcgaggtggcgaattgcggatcgccgcgatgagaaaagtgccagaccaacagcatgcggagggataaataatgatgccgcttacactggcgaatgccggagaagaaaataccatcctcaaagtcggcgggagcgctgaagtcaaaaagcacctcgaagatctcggctttgtggccgggggcacggtgagtatcgtgtcgtcgctcggcgggaacgtgatcgtcaaggtcaaggaagcccgcgttgccattagtgaagaaatggcaagaaaaatcatggtttgagcaatttttcaaataaaaggagagagattatgaaaacactgcgtgaagtcaagatcggcgagaccgtcaaagtcgtcaagctccatggcgagggccccgtcaagcgccgtatcatggatatgggcatcaccaagggcactgaggtgttcgtgcgcaaggtagctcccctgggcgacccgatggaggtcaccgtgcgcggctacgagctgtcgctgcgtaaggcggacaccgaaatgatcgaagttgaataatttatttctacataagttaaggaaacttaacaagaaggagcagtaagaaacatggaaaagcagatcaaaattgccctcgcgggcaaccccaactgcggtaagacgacgctgtttaatgcgctgaccggttcgaaccagttcgtcggtaactggcccggtgtcaccgtggaaaagaaggaaggtaagctcaagaagcacgatgacgtggtcatcatggaccttcccggtatttactccctgtccccctacacgctggaggaagtcgtcgcccgtaactacctcatcaccgagcgtcccgacgcgatcctgaacatcatcgacggcacgaacctcgagcgtaacctgtatctcaccacccagctcactgagctcggcatccccgtggtcatcgccatcaacatgatggatatcgtccgcaagaacggtgatgagatcaacgtcaaggagctctcccgtgagcttggctgcgagatcatcgagatctccgcactcaagggcgacggcgtcatggacgctgccgaggctgccatccgcgccgccaagggcaccaagaccgtcccgatgcacaccttctccggccctgtcgagcacgccatcgcccacatcgaagaggcggccgtgcactccatgccggaagagcagcagcgctggtacgcaatcaagatctttgagcgcgacgacaaggtgctcgcaaagctcagcatccccaccgagacgatgaaccacatcgaagaggacatcaaggcggcggagaccgagctcgacgacgatgccgagagcatcatcaccaacgagcgctacatctacatcgcacagctcatcaagggctgctacaagaaaaagagcacggaaaagctctccacctccgataaaatcgataaggtcgtcaccaaccgctggctgggcctgcccatcttcgcggtcgtgatgttccttgtgtactgggtcgctatggtcggcgtgggcgcgcccgcgaccgactgggcaaacgacggcctgttcggcgacggctggcatctgctgggcatcggctctgccgcctacggcgaggcgagtgacgattacaccgccgcgaccgaagcggctgacgcgttcgtcggcctcgacatggaagacgagagcttcgacgccgacgcggcgctcgaagagctcaaggccttccagcccaccgaagacactgccactgttgatgttgaggatgaagagaccctcgccatcaatgagatgaccgcctactacgacgcgctgcccgagggcgcggacaagatggacgatgttgtccagatgacctatgtggatgctgtcagctacttcgaagagaacggctttgacgagcccgacccggctgactacggcgtttgggtccccggtatccccgttctgatcggcgatgcgcttgacgctgccggtacggctgactggctcaacggcctgatcctcgacggtatcgtcgccggtgtcggcgcggtgctcggcttcgtgccgcagatgctggtcctgttcctgatgctcgccttcctcgaggcctgcggctacatggcccgtatcgccttcgtgctcgaccgtatcttccgcaaattcggcctgtccggcaagtccttcatcccgatgctcatcggcaccggctgcggcatcccgggcgtcatggcctcccgtaccattgaaaacgagcgtgaccgccgtatgacgatcatgaccaccacgttcatcccctgcggtgcgaaagtgcccttcatcgccatggtcgccggcgcgatcttcggtggtgccgcatgggtcgctacctccgcctacttcgtcggtatggctgccatcatcatctccggcattatgctgaaaaagacgaagatgttctccggcgatcccgcccccttcgttatggagctgcccgcctaccactggccgaccgtcggcaacgtgctgcgcagcatgtgggagcgcggctggtccttcattaagaaggccggtaccatcatcctgctttccaccatcgttgtgtggttcaccacctacttcggctgggtggacggcacgttccagatgctctctgaggaacagatcgacgcctccatcctcgccaagatcggcaatgccatcgcatggatctttgcgcctctcggctggggtacctggcaggcggctgtcgcctccatcaccggccttgtcgccaaggagaacatcgtcggcaccatgggcatcctgtatcccgccggctgggctgagatcggcgcggccttcacgcagatcagcggctattctttcctggtgttcaacctgctgtgcgctccgtgcttcgcggccatcggcgcgatcaagcgtgagatgaacaacgccaagtggacctggtttgccatcggctatcagtgcggctttgcttacctcattgccctaatgatcaaccagttcggcaacgccttcaccggcagcctgaacgtcatcggactgatcgcggccatcgttgtcctcgccggtatgatctacatgctcttcaagccctataaggaagctaccaagctgagcgacaagcactaatcccttaacaccgataccctgcgaaaggagtgatttccatgttgaactgggttaccgcaaacctgtcgacgatcatcgtctctgctatcctgcttgccataatcattgctatctccacctatcttatccggcagagaaagaggggaagaaactcctgtggctgtaactgtgcacactgcgctatgcacggcacttgtcacagtaagcagcattaaatagcacaggagacgcgggacttatccacccgcgtctcctgcgccgtatgaaaggaaatgatcttaacatgtacgaaaccaaagtgaagatcgacggcatgatgtgcggcatgtgcgaatcgcacatcaacgacgccatccgcaacgcgttctccgtgaagaaagtctccgcctcccactccaagggcgaagcggacatcatcagcgaagagcccatcgacgaggcgaagctgcgcgaggccatcaccaagaccggctatgacttcgtctccatgacgagcaagccgtatgaaaagcacggcctgttcggctttctgaagaagtaaaagacaaaatgaaaggcacggcttttgccgtgcctttttttgacttagttctgcgcttcggcgcgcttcccgcggtgcgggcttttcaaaaagtcgacgagcttttgctccatgcgggagagctgctgcgatttgagcgtgatgagatagatcgtgcgcttgagcgcgcttttgtccatctcgaaggcgagcagcgtgccgttttggatctcctgctccacggcgagcgccgagagcacggcaacgcccacgccgccggagaccatctgcttgatggcctcgggatcgtccacgcgcgccacgacatgcagcatatcgtgggagaggccgagcgtgcgcagatagttttgcaggctcgtgtccgtgccagagccctcttcgcgcgagacgaacggctcttcgagcagcagctcgcggccgtagacgccgcgctctctgaacgcgcggtagtgctcgttgttcggcgcggcgagcacgagcctgtcgtcgtagagggggaagtagtccacattttccggctcactgaccgcgccgacaaagccgacggcgatctggccggatttaagcatccggtgcacctgctcgctgtcgccgcggcgcagagagtagcggaactccggctcgcgcttcaaaaacgcggcgaggtagcccggcaccagatattgccccggcacggtggacgcgccgagcgcgaccacgggggcgctgtccgcgtcggagaacagcgtgcgcagcgcggcgcagtcattcagaatacgccttgcgatggggtagacctgctcgccctctttcgtcagacgcacgtggcggcggttggagcgcacgaagagctccttgccgagcgcctgctccaaaagcgaaatgtgcgcgctcacggtggactggttgaagaacagctcctccgccgcacgggtgaagccgccgtattccacaacggcgacaaaaatttcaagctgcttgaggctgatatcgttcataagacgggtttcctccggaatgtcgttctactttgaaaagaataatatgagaggacgaaaaaagcaaggcgtttcatcgcttttttcaatgataaactgtattttatgaaatacaggcgatggatcgcgcgctcttgcaatttgcggaggagtttggtatcatggcaggcagatcaaaagaaaaacggcggtgatgataagatgaaaacagcgcttgtgacggacggaaaataccgctcgtccatcgcggcggtgcgtgcgctgcaccgcgcgggctaccgcgtggtcgtgacgcagacaagggcggacgtcaagagcgcacccgcagtgtcggtgtcgaagtcctgcgatgatttccgctggatcgacggcgcgtgcgcggatgcggattacgccgaaaaactgctgagcatactcaaagagtatgagcatccggtgctattttgcgtcggcgcggtgacgctcaacaccgtcgccgcccgtcgggaggagtttgccgcgctggcgaacttcctcatcgcgccgaaggagacgctcgacgcgctcaacgacaaggagagcgtgcatcagcgcgcgctggagcttggcattcctgtgccgcgcgagtacgacggcacgccggagagctatcccgtcgtcgtcaagccgcactgcggggagaagttcggtctcaaggctgccgaccgctacgctgtggcgaacaacgaggcggaattcaacgccatcatggaaaagatgcagcgctacgacccgagccccatcgtgcagcagaagatcacgggcgcgggcgcgggcgtgagcctgctgctcggccgcgagagcgagctgctcggcgcgctgtgccaccgccgcgtgcgtgagtatccgatcacgggcgggccgtcgacctgctgcgagagcttttatgatgaaaaaatgatcgacgaggcgtacaaacttctcaagtcgtttcactttacaggccttgcgatggttgaatttaagggcgactgcattttagaggtcaacccccgcgtgtggggcagtttcccgatgacggaggcggcgcaaagtcccatcgtcgcgcactacgcgcaggccgcgcagggcgggcaagtcacctacacggcgaaggactaccggacgggtgtaaaaatgcgctttttcctcaacgacacggtcgctgcactgagctatctgaaggcgggccgcgtcaaggagggcctgcgcggtctcggcgatttcttcacggcgaaagaggccttgagcgccaagggcgatggcaaggtcatgcgcgcataccttaaaaagagcctgtttgagcgctgagaagggggagaggatcatggagctgcggctcgatctgcacattcattccgagcggtcgttcgacggctgcatgagcctgagcgagatcgttgcgcttgcgcgcgagcgcgggctgaacggtgtcgccatttgcgaccacgaccgcgtgctggacgaggttccggaattcgacgattttctcgtcatccccgcgaccgaggtttcgaccgagcgcgggcatctgctgggtctctttgtgagagaacccatcgaaacgaggaagttttccgagtcggtcacggccattcacgcacagggcgggctggcggtcatcgcgcatccctttgagcacagcacagacgcgaaccggctcggcgatgtgatgagccggcttgacggcgtcgaaatctggaacagccgtgccgaccgcaagaacaagagcgccaacgccatggcgcgcgagctggcgcaaaaatggaaaaaacccgtcactgcgggcagcgacgcacacgtgccagaagaggtcggcggcggcgtgacggtgctggaagcggacgagctgtcactttccgccgtcaaggcagcgctcctgcggggcgcgaagcaggtcgaaggccgccgtggccgcgcaatgtgcgtagcgagaagccagaagaccaaaagagagaagacaaacgcaggcgtaaaaagacgggtaaatggaatgctctttacagtaaaatgcgccttgcaggactttaccaccagggaggatggatggcatgtcatggatcgttaaactcggcaaaaagggaaagaagatcgtcaagaagatcatcacgcccgcggaaaagcactacgtcggctacacgcgccgcatcgagcgcgtgaagacgggcgagcgtatctgcgcgatgacgttcgacgacggcccgatgggccttcctgcatcgcccgaccgatttgtgggcaaaacgctgacggatgtgctgctcgacacgctcgcgcagtacggcgcaaagggcagcttcgacgtcatcggcgacacgagcgagaactaccccgacgaggcgggcaagctcggcagcgcggcgtggggcggcgtcaaattcgaccactaccccgatatccactgcgacgacaagggcggagccgtgcacaacgaccgcctgatccgccgcatgctcgacgagggccatcagatcacaaaccacggctaccgccacatcatcttcggcaaaaagccgtttgtctacggcgcgcgcgagtacctgcctggctttgacgccgcggtcgcggacctgacgcgcctcgacacgctgatgcgtgagcgctacggctatacgctcacgctcgcgcgcccgccgcactatgtcgacaagatggcgggcggcttcacgagttacgacgtctacgagcgcatggggtaccagtatatggccgcgtcgttcgacggcgcgggctggctgccctcgacgcacgaggaccctgaggcggcgcttcaggcggagatcgacgcgatggtcgagccgatgcgcaaggcgctcgaaaaggacccggacttcttctgcggacagatcatcttccagaaggacggctacaacatggccaagcgcacgccggtcgcgttcgctctgggcaagcaactcgagctcctcaaggagtacggctaccgcgtcgtcagcgtgggcgagctgatggaggagagcccgttcacggacgtcgggcgcgacgatccgctgtttgaaaagctcgtcgcgcttgcaaagacgcgagccatcgtcttcacggacaacaagctgcgcctcgacgataaaatgaccgtcggcgagctcgcgatgctgctcgcgccgcgcgacgaggccatctcccgccgcgttgcccagctgcgaaagaccggcaaggccggcccttacgacggcgcaatgtcctactgccgcgaaaacggtctcatcgacgcgagcaccaaggccgaggacgccgtcacaagactgccggacgccatgttcgacaaggcaactgactttacaagaagaaacgtctacgcggcatataaaatggaagaataaaatggcctcaagtacctccgctacatggcggaggtatttttttctcctcgtccacataggctatggcagaaatggacgggaggcgggcggcatgaagaagcggcggcagtggacaacatacagcgggagcgggaagcgcgttgcgccgcgaacgcgcacatcgcgcgtgtctcgcggcaaggagatgggagtgccgcggctttgggtgcagctcatcgtctgcggggcgctgtttgtggcgctcattggcctcaagctgctgatgccggggaacttaagcgcgctgcgcgggacgctggggcagtggctggtgcgcgacgcggacttcatctcggcgttttccgcggtcgggcgtgcggcatccggcgagcaggactggggcgattcgctgtcggaggcctatgtcgcggtgtttggcggcgagagcaaggcgcaggaggtctcgggcaatctgatcggcatgacggtctcggagcaggacgtctccgacctcacgagcgcgcgggagctgcccgcactcgccgtgggcgagcagcgcattttaggcttttcgtacacgacgccgctgtccggcacggtgacatcgccgttcggctggcgcgacgacccgaacggcgcgggcgagtgcttccattacggcatggacatcgcgggcgaggagggcgcctctgtcgcctgctttgccgacggcaccgtcggcacggtgggggagagcaatatcctcggcaactatgtgacggtcaaccacgagggcggattttcaacgctctacgcccattgcagcgccatcaccgcgagcgcgggacagagtgtcaaaaagggcgatgcgatcgctaaagttggctcgaccggcaacgccacgggctcgcacctccactttgaggtgcacgacggggaagagtatctgaaccccgtttactatgtggttccctgaatgcgggctccacgtttcgtggagcttctggctgctcattctgctcgcggccatcgtgagcccgctgacgatcgtgctctcgattttgctggctgccacgctgcacgagtgcgggcatctgctggcgctgcgggcgtttcatgtgcccatcgaagggctgcggctcagcgcattcggcgcggtgctgcacgcgcgcggagcgcaaaggctctcttacgggcgtgagcttgtcgtcacgctcgcgggctgcagcatgaaccttgtctgcggcgttctgacggcgtggttttcgctgcactatgtgtgggtggagggcttcgtcttcgctggcgcgcacattctgctctgcgcgttcaacctgctgcctatcccgccgctcgacggctcgcacgcgctgaatctcgcggtctcggcgctgtttggcccgctcgtgggcgacgcggccgcggcgcttgcgggcgtcctctgttcgctcgcgctgctgggcggggtagtgtatctctatgtgcagacgcgcggcggcgcgctcgttatttttgccgcactggcactgcttttaagcgcgctcaaagaactgagacttgcgcgtcgcgcaataaaagtgtagaatagccgaaaatggatgtttgtgcccattttcggctttttatttttgcttacttcagaggagaacttttgtggataagagattggaacgcattttgccgcgcgtgcagaagcccgcacgctatgtcggtggggaattcaatgccattatgaagaataaaagcaaggtcgacacgcgcgtcgccttctgctttcccgacacgtatgagatcggcatgtcgaacctcggcatgcgcattctgtacggtgtgatgaacaatattgagggcgtgtggtgcgagcgctgcttcgccccctggggcgacatggagcaggagatgcgaaatgcgaacatcccgctctatgcgctcgaatcgtttgacccgatcaaggattttgacatcatcgccttttccattggctatgagatggcgttccccgcgatggtcgacatgctggacttagcaggcgtgccgctgcacgcgagcgaacgcacggcgctcacaccgctcgttgtcgcgggtggcacggcaatgtacaactgcgaacccatcgcggattttatcgatcttgctcttatcggcgagggcgaggagatggatgtcgagctcatcgagctgcaccgtcaggcgcggcgagagggctggagcaagcacgagtttctcgtgtgcgccgcgcagatcccgggcgtctatgtgccgagcctttacgacgttgcctacaacgacgacggcacggtcaagtccatcacggcaaacgagggtgcgcccaaggtcgtcctaaagcgcatcatgcgggacatggacaaggcctactatccgaccaagaccatcgttccctcgaccgagatcgtgcaggaccgtgtgtcgctcgaactgtttcgcggctgcatccgcggctgccgcttctgtcaggcggggtatgtctaccgtcccgtgcgcaaccgctcggaggagctgctgcgcggctacgccgttgaagccgtcgaggactcgggctatcaggatatgacgctctcgtcgctctcgacgtccgactacccgcaccttgtcgagttgtgcgacgacttagaggacttctgcgcccagcggcacgtgacgcttgcgctgccgtcgctgcgcgcggataacttctccatggcgctgatggagcggctgcaaaagggcagaaaaacgggcctcacattcgcgcccgaggcgggcacgcagagattgcgcgacgccatcaacaagaatctgacggaggaagatctgctcgaatcctgccgccgcgcgtttgcgggcggatacagcgcggtcaagctctacttcatgctcggtcttccgaccgagacggacgaggacgtgctcggcattgccgacatcgcggcccatgtcatgcacgcctggcgcgaaagcgcactcaacaagacgcgcggcgtgcgcatcacggtgtcgacctcgtggtttgtgccaaagccgcacacggcgttccagtgggagccgcagatccccattgaagagtacgagcgccgcgtcaagctcctgcgcgaggcgatgaacaccaagtccgtcacgtacaactggcacccctcgcccacgagctttatggaggcggtcatctcctgcggcgaccgccggctcggcaaggtcatcgagaccgcgtggcgcaagggtgagacgctcagcgcgtgggaggactattttgatctgaaccgctggatggaggcctttgaggagtgcggtcttgacccgcacttttacgccaaccgccgccgcagcgaggatgaaattctgccgtggagcatgatctcctgcggcgttgcaccggggtatctgaagcgcgagcacgcgctgagctatgagggtgtgacgacaccggattgccgcacgcactgcaacgcctgcggcgcaaactgcctggtgggagggaaatgcgatgtctaaattgcggctggtttttgtcaaggagcatcaggcgtcctacatttcgcatcttgacgtgatgcgcacgttccagcgcgtgttcccgcgcgcgggcctttctatcaagcactccaacggcttccacccgcaccctattttgtccatcgtgctgccgctgcccgtggggcagtcgagcgactgcgaaattctggactttgaaagtgtggaggacagcacgggcgagggtgtggccgaggcactgaacaccggtatgcccgcaggtcttcgcgtgctggactgctatagcgtgacgcgccccgtgcgcgagatggtcaacctgcgcgcgcagctcgaaatggagtacgacaacggcgtgcccgagggcgcgtgtgagcgcatccgcgagtttttcacgcaggaggagatttttgtcgaaaagcgcacgaagcacaagggcatgaccgagctcaacattgcgccgctcatccgctcgctcacgctgacggagggggagggcgtgatcctcgccgatgcggtcgtcgccgcgcaggacccgggcctcaaccccgcgctgatcggcgcggcggtcgcgcggcacctgccggagatcgcgccggactttgttcgcgtgcgccgaaaagaggtctacgacgcggaaatgaacgttttccgctgatttctcccgtgtttttgcaaataatgcttgcattcccgttggggatgtgatatgctaccatagcttgaaaagggcggtcctctgccgtgcgcgggtgaaagagtcccgacagcgccgaagaaaagcggtcaagaacgcctataaataggaggaaaatatccatggatctcatcaaagagctcgaatcccagcagctgaaaaaggaaatgcccgtcatcaacgtcggcgataccgtccgcgttcatgtcaagatcaaggaaggctcccgcgagcgtatccaggtcttcgagggcatcgtcatcgcgaagaagcacggcggtcttgaggagactttcaccgttcgtcgtcttgcctacggcgtcggcgtcgagaaggtgttccccatccactcccccctcatcgagaaggtcgagaccgtgcgcagcggttatgttcgccgcgccaagctgtattacctgcgcggccgcgtcggtaaggctgccaagatccgcgagaagctgtaaggcagattctttgagaacaaaaaagcatggcgtttccgccatgctttttttgttgcctttttcaaaaagcgtgctacaataatacattagaaaatcaggcgcattttgccgcagagagagactgttagtccgccgctgcgcggcgctgggtttaggagaccgaaatggacgaatttgatcagaaaatggagatcagcgagcagccgcaggaggagatcgtggaaaagatccccggacgcgacgtgtatgagacggtctcgtctctcgtctcggcgctgctggtcgttgtgctggtgtttacgtttcttgtgcggctgatgggcgtttccggcccgtcaatgatcccgacgctgcaggacggcgaccggcttctcgtcgtcaactcgctgctctgcggcgactatcaggtcggcgatatcgtcatcgcgcgcaaggagacctttgactcgaagcccatcgtcaagcgcgtcatcgccaccgcgggccagaccgtggacatcgactttaacttgggtcaggtctatgtggacggcgagcttctggacgaggactacatcaacgactacacctatcgcgaagagggcaccgtgttcccgcttaccgtgccggagggcgaagtcttcctcatgggtgacaaccgcaaccattcgaacgacagccgcgattcctcgctcggcacggtggacacgcgccttctgatcggcaaggcggtgttcctcgtcttcccgggacgcgactatctgaccgagcagcgcgagtttggccgcatcggtcttctaaagtaaagggggactgagaaaatgcagttggattctctcagctggttcccgggacatatgaccaagacccgccgtatgatcacggcggaactcggcaatgtggacgctgtgtgtgagattttagatgcacgcattcccatgagcagccgcaaccccgatgtggacgagctgacagcgggcaagccccgtttgatcgttttgaaccgcgtcgatcaggctgacccggaaatgacgaaaaaatgggcggcgtatttccgctcgctcggctgcgccgtcatcgaaacggacgcgaagcagggcgggggcgtgaagcagttttcttccgccgtgcgcacgctgctgcgcgataagatcgcctcttacgaggccaagggccagatcggccgcgtgctgcgcgtgatggtactcggcatcccgaacgttggcaagtcgacgtttatcaacaaggtctctggccgcaagagcgccaaggcggaggaccgccccggcgtcacgcgcacgaagcagtgggtgccggtcgacaagacgcttgagctccttgatacgccaggcatcctgtggccaaaatttgaggacagcagcgtcggcgtgcgtttagccttcaccggcgcgattcgcgacgaggtcatcgacatcgaagagctcgccatgcgcctgatggattacctcggcaagaattatcccaaggcgatcaaggagcgctataagctcaccatctccgaggaggacgacggctatgcactgcttgagaaagcgggacgcaagcgcggatttttgatctccggcggcgaggtcgacaccgagcgcatgagctgtatcctgctcgacgagttccgcggcggcaagctcggccgctttacgcttgaattcccgccggagggcgaacgcacatgagcgtcaacctacactacgaggacaaagcccgcgccgcgggcttttcatccgtctgcggcgtggacgaggcgggcgcggggccgctgatgggccctgtatacgccgccgccgtcatcctaccggagggctgtgagatcgaggggctgaatgactccaagaagatgacggagaaaaagcgcgaggcgctgtttcccgtcatctgtgaaaaagccgtcgcctacgccatcgcgtccgtcgacgagaaggagatcgacgcaacggatattttgagcgcacgcatgaaggcgatgcagctcgccatcgatgcgctgcaaatcccagcggactatgcgctcatcgacggcaaccgcgaccacggcgcgtcggcaaagatcaccacgccgcacgagaccatcgtcggcggggacggcgcgagcttatccatcgccgcggcgagcgtgctggcgaaggtcagccgtgaccattatgtggtcgaagtgctcgacccgatgtatcccgagtatcagttcgccaggcacaagggctacggcacaaagctccactaccagatgctcgatcagtacggcccgagccctgtgcaccgcatgacgttcctcaaaaagtgggaggcgcggcgatgagcacgaagcaggacggcgactggggcgaggcgctggtcgaaaagtatctgagcgagcgcggctgccgcatcgtggaacgagagtggcgctgccgcttcggcgagatcgacctcatcgccgagaaggacggcgtgctgctgttcgtcgaggtgaagctgcgcacaaatttgcagtacggtgcgccgcgcgagtacgtcacggtgaaaaagcaggaaaagctgcgcgccgcggcgcttttgtacttgagcgagcgcgagctggatgtgcccgcccgcttcgacgtggcggaggtctacaccgatgtgcgccatagcgcgggcaaaacgcgcatcgcctacatcgaaaacgcattttgatctgactttgggagggaggcacgcgatggcattatacgcgatcggcgacctgcacttatcgctcggtacgaacaagccgatggatgtgttcggccccaaatgggcgaactatgtcgagcgcatccgcgaaaatttttcgcacctcagtgacgatgatgtcatcgtgctggcgggggatatctcgtgggggatgtcgcttgagcagtcgctgcccgattttcaattcatcgatgcgctgcctgggaagaagctccttttgaagggcaaccacgattattggtgggggacggctgcgaagatgaaaaaattctttgctgagcatgatattacgaccctcgatattctctacaacaacgcctttttctacggcgaccacgccatctgcggcacgcgcggctggttttatgaagaggacgccgcggggacgcacacgggcaagatgctcgcgcgcgaggcgctgcggcttgaagcgtcgctcaaggcggcggaggggaagcccatctactgctttctgcactatccgcccatctatcagggctacaagtgtcccgagatgctcgagcttctcgacaaatacgaggtcgagcgctgctattacgggcatctgcacggctacacgcaccgccgcgcgttcgaggggatgcgcgaaaaaaccgaatatgcgctgatcgcggcggattatgtcgcctttcagcctgtaaaaatttgcaattaagacataaattgatgcaaaaaagggtggaaattttgaggaagctatggtataattccactttgcaaaagcatcattatctgatgttaaacggaggaaaaagaaatcatgactgtcaaaaatgttgaaaagctggaaaagagcagagtcgcggtgaccgtcgaggtcggcgcggaggaatttgaagccgccgttgccaaggcctacgccaaggctcgcaataagctcagcattcccggcttccgccccggcaaggccccccgcaagatgatcgaaaagctctacggcgcgggcgttttctacagcgatgccgttgacatcgccctgcccgaggcatatacgcaggccatcggccagagcggcctcgatgttgtcggctatcccgagatcgagatcgtggacgacaagatcgacgagaacggcttcaccttcaaggcgaccgttgccgtgtatcccgaggtcaagctcggcgagtacaagggtctgacggctgagaaggaagagatcaaggtcagcgccgacgatgtcaaggagcgcctcaatgagatggccgagcgcaacgcccgcctcgtctccgtcgaccgcaaggccaagaagggcgacatcgccgtcatcgacttcgagggcttcgacaacggcgaagcgttcgagggcggtaagggcgagaattacgagctcgagctcggctccggcagcttcgtccccggctttgaggatcaggtcatcggcatgaaggccggcgaagagaagaatctcgacatcaccttccccgaggattatcacaaggacctcgccggcaagaaggtcgtcttccacgtcaaggccaaggagatcaagtgcaaggagcttcccaagcttgatgacgacttcgccaaggacgtgtccgagtacgacacgctcaaggagctcaaggacagcatcaagcgcgagatcaccgagcagcgcgagcagtccgccaagtatgccgtcgagaacgagctgatggagaaggtcgccgcgaacatcgagtgcgacatccccgatgcgctcatcgatgagcagtgcgcccgcttcctcgaggagttcaagcagcgcttacagtctcagggcatcccctatgaccagtactgcaagatgaccaacatggatgaggccaagttcctggaggagggcaaggagcccgcgacccgtcaggtgcgcatggacctcgccgtgaacgccatcatcaaggaagagaagctcgaggccaccgacgaggaggtcgaaaagcagtacaacgaccttgctgagaagtacagcatggacgttaacgagctcaagaagtatcttgacgccatgtccgtccgcacgcagatcatccgcgacaaggccatcagcgtcgtcgtggacagcgcgaagatcgaaaagaagaaggctcccaagaaggaagccgagggcgaagccgctgaaggcgaggaaaagcccgccaagaagaccgctgccaaaaagtccgccaagaaggaagaagaaaaggctgaataatcggcaaagcggccataatagatagaaacgacgatcaaccacaaatgcctgccatttgtggttgattgtgtacataccaattttttgaacagggtatgaacaaggaggttaccaagatgagtttagtcccttacgtcattgaacagaccaaccgcggcgagcgctcttacgatattttctcccgccttctggaagaccgcatcattttcctcggcgaagaggtcaacgatgcgaccgcgagcctgatcgtttcgcagcttttattcctcgaggccaaggaccccgacaaggacatccagctctatatcaactcccccggcggcagtgtgacggccggcatggcgatctacgacacgatgcagtatatcaagtgcgacgtgtccaccatctgcgtcggcctcgccgccagcatgggcgcgttcctgctctcgtccggcgccaaaggcaagcgcattgcgctgccgaacgcggagattatgatccaccagccctccgccggtacgcagggcaaggtcacggatatggagagcgacgtggagcacttcctgcgcatcaagcagcgcttgaataagatcctggccgagaacaccggcaagacgcccgagcaggtcaagctcgactccgagcgcgaccactggatgacggcggatgaggcgcaggcctacggccttgtggacaaggtcatttacaagagataaggacagtttgacttatgagtgaagataggaaaaaagagcttcgctgctcgttctgcggcaagagcgagcacgaagtgcaccgcatgatccaggggccgggcgtgcgcatctgcgatgagtgcgtccgcctgtgcatggacgtgctggaggacggctatgagccgcacgacgagctggaagcgcccgactccatccccacgccgcgcgaaattcgcgaggtgctcgaccagtatatcatcgggcaggaggcggccaaggtcgcgctgtccgtgtccgtctacaaccactataaacgcatcttcttcggcggcgacgacgaggtggagctgcaaaagagcaacatcctgctcctcggccccaccggcagcggcaagacgctctttgcccagacgctcgcccgcattctgaaggtgccgttcgccatcgcggacgcgacgaccctcaccgaggcgggctacgtcggcgacgatgtggaaaacattctgctccgcttgcttcaggcggcggattacgacgtggagctcgccgagcgcggaatcatctatgtcgacgagatcgacaagatcgcccgcaagagcgagaacacctccatcacgcgcgacgtctccggcgagggcgtgcagcaggcattgctgaaaatcgtcgagggcacggttgccaacgtcccgccgcagggcggccgcaagcacccgcatcaggagttcatccagatcgacacgcacaacatcctcttcatctgcggcggtgcgttcgagggcatcgagaagatcatcgagagccgtctcgaccgcaagtcgatgggcttcggcgcagaactcaagagtaagaacgatgtggacgagagcaagattttacgcgaggtgcagccgcacgatatcttgaagttcggcatcatccccgagctggtcggcagactgccggtcatcacggcgctcgacgcgctgacgcgcgacgaccttgtcaagatcctgacccagccgaaaaacgcgctcgtcaagcagtatcaaaagctgttttcttacgacgacgccgagctcacgttcgagcccaaggcgcttgaagcgatcgccgacaaggccatcgagcgcaagatcggcgcgcgcggcctgcgcgcggtgatggagggcctgctgatgaacgtgatgtacgacatcccgtccgaccgcacgatcgaccgcgtgaccatcacgccgggctgcgtggaggggacggaacagccgaaaatttcccaccgcacagagaaagaaggggaggtgccgcagccgtcgctgccggcagactccgcttcataaggagaaaccccatggaacctgtaacaaaaaatcttccggtcatcgccatgcgcgggctcaatgtgttcccgcgcatgaacacgagctttgacctcgagcgtccgatctccgtgcacgcgcttgagcgcgccatggaaaacggggaggagatctttctcgtcacccagcgtgagatcggcgtggagcagccggaggaaaaagacctgtacgagatcggcacggtcgcgcgcgtgacgcagatcttgcgcgtgtctgaccgcgtgctgcgcgtgatgatggagggcgcgtgccgcgcccgcctcaagcggctgtggcagcgcgagccgtttttgcaggcgcaggtcgagctcatcgacgagccggccacctcctgccatagcaagcggacggaagcgatgctgcgccagacctacgccagcgtgacggaatatgccgagctcgcgcagaaattgccggacgatgtctacgccgccattttgtcgacgaacgatcccggctatctggccgattttattgcccagcagctcaacctgcgctatcaggacaaacaggatatcctcgacgagctgcgcccgctgccgagattgcagcgcatgaacgagattctgcgccgcgagatcgaagttaccgccatggagcaggacattgaaagtaaggtccgctcccgcgtcggaaaaattcagaaggattttgtcctgcgcgagcagatcaaggtcttacagaacgagatcggtgagggcggggaggacgaagaactcgacgagtaccgcgagaagatcagcaaggcgcacctgagcgaagaagtggagcgcaagctgctgaaagatgtggacaagctcgccaagcagccgttcggcagcgccgaagcgagtgtgctgcgcaactatctcgacacctgcatggaaatgccctggggcgaggagacgaaggagcgcgccagcgtagacgccgcgcgcaagattcttgaccgcgaccactacggcttgcagaaggtcaaggagcgcattttagagttcatcgccgtgcgccagctcaaccccgaggcgaaggggcagattttatgtctcgtcggccctccgggcgtcggcaagacgtcgatcgcgctgtcggtcgccaaggcgatgaaccgcaaggtcgcgcggctgtcgctcggcggcgtgcgtgacgaggcggatatccgcggccaccgcaagacctacatcggcgcgatgcccggccgcatcatcgaggctatctcccgcagcggttcgatgaatccgctgctcgtgctcgacgaggtcgacaagatgggcagcgacgggcgcggcgaccccgcgtcggcgcttttagaagtgctcgacagcgaacagaattatgccttccgcgaccactaccttgaaattcccgtcgatctgagccgcgtcatgttcatcatgacggccaacacgcttgacaccattccgcgtccgctgctcgaccgcatggaaattattgaaatccccagctacacggacgaggagaaggtgcagatcgcgcagcggcacctgctgcccaaggaacgtcaggcccacgggctgacagcctcgagcctgcgcgtggacgagagcgccatccgcgcggccatcgcgcgctacacgcgcgaaagcggcgtgcgttcgctcgagcgccagctcggcaaaatctgccgcaaggcggcaatgcagcttgctacaagcgatgtaaagcgagtcaccgtgacagagaagaacatcaaggacttcctcggtgcgccgcgtgctgcacaggagaagattcccgaaaaggaccttgtcggcgtggtgaacggccttgcgtggaccgaggtgggcggcgaaattctgcccgtcgaggtcggcgtgatggatggcagcggcaaggtcgagctcacgggcaacctgggcgacgtgatgcaggagagctgccgcgcggcactctcgtgcctgcgccagcgggcgcaggagctcggcatcgcgccggacttctacaagacgaaggacatccatatccacttccctgagggagccatccccaaggacggacccagcgccggtatcgccatcgcgacagcggtgctctccgcgctgacggggcaggcggtacaccgcgatgtcgccatgacgggcgagatcacgctgcgcggccgtgtgctcgccatcgggggcttgcgcgaaaagacaatgggcgcgctgcgcgcgggcgtacatacggtcattctcccgaaggagaatgaaaaggacctcgacgagatcgacccgctggtgcgcgaaaagctgcgttttgtgccggtcgagacggtggatgccgtctttgccgaggcgctggtgctgcccgaaaaatgcaccgctgccgcgcacgagaactatcttcctcccgtgcaggagagcgcgcatggcgcgctgcgtgcgggcgaaatgagctgaaaggaaacgaaaaccatggtgatcaacttcaacaaggtcgaatttatcctctcggcggcgtcggaaaagcagttcgtgcgcgacgggatgccgcagctcgcgtttgcggggcggtcgaacgtcggcaaatcgtccgtcatcaaccggctcgtcaaccgcaagaactttgcccgcgtgggtgcgtccccgggcaagacctcgcagatcaactactttaagatcgacggcaagctctacctcgtcgacctgccgggctacggctacgccaaggtctccaagaccgagcgcgaccgctggggcaagctgatggaaaactatttccagtctgcggggctcattcacctcggtgtgcagatcgtcgacgcgcggcacaagccgacggcggacgacgtgacgatgcacgactacttcgtgcagacgggctgtcccgtcgtgatcgtggcgaacaagctcgacaagctcaaagcgcgcgagatcgagccgaatcttgcccaaattcgcgagacgctgagtttgcgcgacgatgagctcgttattccgttctctgccgaaaagggcacgggcaaggagcagctgattgcggcaatcctcgaccatttgaacgactgaaaaggaataatgcttcacagaaaagcctctgtatgggttgaccatacagaggctttttatcgtatttcccggggaatcagcggcgcagcgtcaaaagcgcggtgcagtgggagaaggattcaaacgtcagcgcagggaagtgagggcggagctcgtcatagacgaagtaaatttcatcctcgtcccactcactgcctgccgcagtccgacacgcttcgagctcttcgcgcgtgcggaaggcgacgtcgccgatgaaaagacagccgtcctgattcaaaagcggcagaagcgcgcgaagaaagtcgattttctgcgcgtccgtcaggtggtggagcgagtaggtcgcgacgatggcgtcgtactgccgtacgcaaagctcgggcacaaggcctttggaaaaatcgccctgatagagccgcgcgtccggcatttttgcctgcgccagttcgatcatgcgcgcggaaaagtcctgtccatagatttggcagccctgctcgtagagccgcgaggtcagtatgcccgtgccgaagccgatatccagcacgttatgcccgctctgcgcgagcacgcgctgatagagcgcgttcatcatggcacggtaacccgcaaaggggtagcggtcgttctcgtcggagaggccgacgctcttgtcatagccgtcggcccagaggtcgaagccggtattgttcagcatgtcagtcctccttttcgttcagcgggggaagtcccagctcatagaacgccacggcgctcgctgcggcgacattgagcgagtcgacgccgtggtacatcgggatcctgaccgtgtagtcgcagctcgcgatggtcgaggacgcgagcccgtcaccctccgtgcccatgacgatggcaagcttttcttcggcggcaaggcgcggatcgtcgagccgtacggagtcgttgcgcagtgccatcgcgactgtgcggaagccgagatcgcgcaaaagctgcgtccagtcgccgctttcgggcaggtaggtccacgggatgaggaacacatttcccatgctgacgcgcgaggcgcggcgataaagcggatcgctgcccgcagtcgtgagcagcaccgcgtccatgccgagcgcggcggcggagcggaagatcgcgccgatgttcgtcggattcatcacgttttcgagcacgacgacgcgccgcgcatcgcggcagacgtcctcgacgctttggagcttcggccgccgcatggcgcagagcatgccgcgcgtcaggtgaaagcctgtgagctgcgtcagcacggattcatcagcggtgtaaaccggaatatcttgacagcagcgggcgagaatttcgcgccccttgccctgcgtatgctgccgctccatcaggaacgacaccggctcacagcccgcatcaagcgcacggccgatgacgagcggactttccgcgacaaagagcgcgttgtcggggtccgcgcgattgagcagttggttttcggtcaggcgcgcgtagacgtcgagcgcgggattggaaaaatcgtggatttcgatgatgtttgccataggttttcctttttaagattccaagatgttcagcagtgcggcgacgtccggcagaacgaacgtcggctgcgggtcagcggtggggaggccttcttccttcgtctcgcccgagagaacgagcagcgtgtcgatgcccgcgtttgcgccgctggcgatatccgtgtagatacggtcgcccacgagcagtgtttcctgcgcggaaacgcccgcctcgagcatcgcgagctgcggcatcagtggttcgggcttgccgatgacgatggggcggcgggatgtcgcgcgccagagcatttcgcatacgctcccgcagtcgggcacgaagccgtaggctgtggggcagacccagtcgggattggtcgcaaggtagggaacgccctgtccgagcaggatgcaggcgtcctccagcttttgaaatgtcagctcggtgtcgaagcccatcaggagcgcgttcgcgtcctcacgccgttctgcgacggtaaagcccgccgcgcggagctgtgacttcatcgattccgtaccgcagacataatagcgcttgtcttgaccgtcgtgctcgcggagatagtgaatcagcgcatcgaccgaggtgagaaaatcgcccgactccgccgcgacgccgaggcgtgtgagcttctgcacataggcctccacgctgcgcgaggagttgtttgtcagaaagcggtactgcccgccgcgtgcgcggatggcagagagcagctcgcggacgccttcaaagagccggtcgcccaaatagagcgtaccgtcgaggtcgaaaagaaagagctttttgcactgaagtagattatggtcaaccattggtcacgctttctttttgccgtcgatcgcgatgaagaagaatgagctcaccgccagaagataggggtagaagaggttcggaatgatgtcgaacgctgagatggcgtagcccagctcatgcgccgccgagatcgcgacgagcatctgcgcgccgtaggggatgatgccctggaagatgcaggagaacgtgtcgaggatcgacgcggccttgcgcggtgtgatgccgtattcctcgctcatctccttggcgatggggttcgccataacgatggcgacggtattgttcgcggtggcgatatccatcgcgccgacgagaaggcccatgccgatctggccgccgcgcttgccgcgaaacgcctttctgatccagccgagcagcgcttcaaagccgccgtactcacggatcagcgcacagatggcggaaactaagatcgcgaccatcgaggtttcaaacatcccggccgcgccgctgcccatgttttcgagcagggccttgacagcgaggatgccggtctgtcccgtcgcgccggtcgcgagcgcgatgaccgcgccggagacgatgccgatgagcagcacaataaagacattgatgccgatgatgccgccgatgagcacgagcacataggggatgatctgaatgaggttgtagggcggaatctccgcaggtgtcacgtcggcgtggagcgtcaacacgaggatgagcgcgagcgacgcgagcgcggcggggaaggcgatgtggaaattttcgcggaatttgtccttcatcgcgcagccctgcccgttgcaggcggcgatggtcgtgtcggaaatgaagctcaggttgtcaccgaacattgccccgcccatgacggacgcgacacacagcggcagggaatagccgctcgccgcggcgatgggaatggcgatggggacaatgagcgtgatggtgccgacgctcgtgcccatcgcggtggagacaaaacagcttacgacgaacagcaccgccacggcgaatttcgatgggatgatcgagagcataaagtacgcaacgctctccgcgctcgagcggcccacgacgccgacaaacataccggcggctaagaagatgagcagcatcgtgatgatgttcttatcgcccacgccgcggcccatcagcgtgagcttttcgtcgaacgacagcgcacggttctggcagcaggccacgagcagcgcgatgaggaagatgacgacgatggggatggaataaaatcccatcggaattttgagcacatactcaaagacaaggccgaggcccagatacaggacaaggaacactaagatcggcagcagcgccgcgggattggctttttttgacatgggatgacactctctttctccaaacataaaaaaagctcctgcgcggagctttttgtgcgatatgaattattataaggagcgaatagatgcttgtcaagtaagacttaactaaatttgagcgcaaaagggcttgacagaaggactctaatctgttagtgtacaaatatactctaacggattagagagggaacaagatggaaacgccgaaaatttttgagagcgaataccgcttttgccaaattctgtgggcacacgagccggtcaagagccgtgaattggtcgcgctctgcgccgagcacctgggctggaaaccgacgacgacctacacggtcatcaagcggctctctgagcgcggggtgctgaaaaacgagaatactgtcgtcacgtcgctcatctcacaggacgaggcgcagaccgccgagatcgacgagctgctcgacaagcgcttcgacggctcgctgcctgcgctcgtcgccgcgtttacaaagtcgagtcacgtgagcgacaaagagcttgacgaggtgcagaaaatgatcgacctttaccgaaaggagaatcatcatggatgacgtctttttgaagctcgtgaacctcagcatcagcgcaagctggctcattctggcggtgctcgtgctgcgggttgtcctcaaaaaagcgccgaagtgggtcatgccgcttctctggggcgtggtcgcactgcggcttgtctgcctgttttcgattgagagcgcgctctcgctcatcccgagcgccgagacaatcccaagcgagatcgtgaccgaaacgcgcgagccggtgctctacgagcaggcgacgctcgacatcgtcacgaatccgacgctgccttcagcggcggaggtccccgtcggcgtgagccgccagcaggcgcaggtggacttcaacatctacagcgtcctctggctcgccggtatggcggcgctgctcgtccacgcgctcgtgagcgcgggaaaactgaaaagaaagctcgcaacggccattttactgcgggacaacatctacgagagcgaattcgtcgattctccgtttgtcttcggtgtaataaagccaaaaatctatcttcccatgcacatggacgaggggacggcggcgtatgtcatcgcgcacgagcatgcgcaccttgcccgccgcgaccactggtggaaggtgctgggctacctcgtgctcgcgctgcactggttcaacccgctggtgtgggtcgcctacatcctcttctgccgcgacattgagctcgcgtgcgatgaaagagtcgtgaaggggctggacggcgcggcacgcgcagactattcgcaggcgctattgtcctgcgccgcgccgggaagagctgtcgcggcctgcccgctggcgttcggcgagggaaacatcaaaacgcgtgtgaagagtgcgctgcactacaaaaagcccgcgttttgggtcgccgcggcggcggtgctcgcggtcgtgatcatggccgtgtgctttttgacgaatccgaggtcggacatcgatgcagagacgctgctcggcacctcgagcgggaaaatcacgcgtgtcagcgtcaagatgggggaggcggacagcggtgaagagtaccgcatgtcgacaccggagatcaaggatctcctttcactgctggacgcgatagaatatgagcgcctcggctctgcgtcggtgatgcagggctgctatgcaagggtgtacctcggagacagaaaagaggagtactgcgagctgatgctgtcggaggacggcatactggcaaaccccatcaagggcggcaaaaaagcgcagctgtatgagctgcgttccggcggcacggtgctgaaaaattatgtcaagtggtgcataaatcggaaggaccctacggtgccggaggacctttttgatcagatcgaccagctgctctgcgacatgccactcggggagtatgtgttgggagaggtcgtgttcgaagactcagcttgggaagcaagctatgccgagacctttgacgagggaccggcggacctgcgggtcggcggtgcatgttctctggccggaccgcacggggcgagcagcgggtattattaccgcttttccacatgggaagagatcacgctgaaaaagagcaacttcgactggctgttccgcagcggaagcggcgaagattggaacggcacgagcgctgcgaagctgcgccgagaaaatgtgcgcgcctggcgcggcacgagaacggctgaggacgacaatgcgacggccccgcttgagagatatctccgctgggatgagctcacggcgatggatcagtggctcttattgcagcagaaggacggcagtctttacctcgtgatgggctatcgcagcggggcgtatccctaccgctggatcgtccgcctgaacggcggcgcgaccgagctgacccgcgctgacctgaacggcgacgggatcgaggaagtgatctcctataccggcacttccacgcaggagccgtaccggctgcgggtgagcgatcagagcggcgaagagctctggagcgcggagctggggctggcgcacgtgggctggagcagctatttcctctatcgcgacagcgtcaagacggcgctgctgtgctacgagccgacgatgtatcagggcgaggcgtcgtattcctataggctctttctgctcagcggaagcgagacgaccacgctggcggagaattcggtgagcttcagcataaatcccgattctaccgacccatggcccgccgaggcacagaaattcgcggacgaggtcaacaggcttttagatcagagcgagcttttattctccacgctgaacggcgagctgcactgttacggcgacggcgcagtcatccgctgcacagatccgtcggagagcgacggcagcaggacgctgatgtccgccgacctcgacaatgacggcagagcggagcggattgtatgcaagaacacgttcggcgtctatgagctgtgcatcatcgatgacaacggcgaggaaatgatgcgcgaccgcatgtcggagggtgacgtgtacctcctttgccgtgaaaacgggcgcgacatgctactgctgtatcacttgatcgagggcaaatatcagggcagaagcagctattacggctattactatggactttacacctatgacggcggcagctgtcacgttgtggaaaatgccaacgcgggcatttatctgaatccgaccgatggccagaacggcgagtggggcaaatcggaggaagcgttcgccgcgcgcgtcaatgcgctgatagcccagagcgaattccttgtcgcttggcagggtggcgagctcattttgacgagcgaggtgtatcgctggtactgcgtatcgccgagaaagctcacggcgacgctggacagcacgacggtcagtttcggcaaaaagagctgggactttgccgggcaatacccgtcgctcagcggctttgagggcagcgagacggtgggcaactaccttgtggtgacgggacgtctggggaagaaaaacgacctctatgtggtgttcaacgccatagacggcacgctgctcaagaccttccccggcaacaaccttatctggcaaggagatgacctttccaccgcggtctactcctactggtcggacatctacgcgctcaacgggacgaagctcgccgcactcgatcttacgagcggcgaggagatcagcggcctcacctttgcgccggacggcgtgtcaatcattgcgacggtctccggcaagagcggcgagcgtaaggtgaccatcacgcgcgagggcagcgcgcagcagatttcgctcaccgattggatagagggcgacggcgcggagcgcacgtacttcgcccctgtcgggatcgaggggaacgagacatttctggcgacggtcggcgtgagctaccggctggaacagcagtcggacggcacatcccgcatcgcggagatcacaggcgcgcaggggctcacgctgccgcgctatcgccgcggctgggtcagcgtggacgaaaaggccgatgtgctggacgccgcgatcgcggacgacggcaagagcgccgacgtgacggtgcagtattacgcgagccttgggtcgtcggggtatcagacgtacacggcggtggttaatattgtcgcaccttaggggtgcgagaggttccctgcgccgcgcagggagtgcgaataaagggggccattctctcacgtgagagaatggcccccttgaaccaccaagagaacgcaaggggctctgcccctcgaccccgcacattggcagtctgtatctcgaagagctgcggcgcttgccgaatcaggtgcggtgtacatggcttcgccatgaatctctgcgattcgtgacaggtcgcaaccgcgccttactatcgtgaggcgcgagtgacgtttgctcggcggcagactgcgtgcgaaatagcggcattgctgcgctcgccgcattgtggggactggcggtagacggaaattagtttgcactcctacaagatcagcagagcggcacccgcaaggggtgtgccgcatccgtaaggcggcagagccgccaacggctgcgcaacagcggataatagaagcacaccaagtcgtatagcaacactaaacgcggcaacgccgcgcgcaggcatttccattccggaggcaagagacttgcgcaagcctgagactgccaatctaagcctttctcttggggttccaaagggggcattctcttttgcgaaagagaatgccctctttgattgcgcgacacaggattattgacgaatacgccaaacgccgtcttcgttccggagaaggacgaaataatcctgcatgcgctcgaacggcgcgtagctgcggcggtgcttgtcgacgttgaaatcctgatattcgcgcgcggtctggatggggtactggaagcggctgctctggtggacataataaaattgtccgttaaggcgggacacattatcgctgaggggatgaagagagcaggcgatatagccgcgccggttcgtgccgctgttggggaaagagaggtcggcacagtagagctgccggaagcaattttcgtaccagttgctgaggctggcctgttctgtgccgggatcaatgtagggagcggtgtaggtcgtgccgtccggactgtcatagaacacccggccggagaattcttcggcaagccagctgccggtgtcgcagtttggctctacggcaaagctctctgtgccatagaaatgtgtgccttcgtcccagcggaaatgataggagagaaacagtctgccgaaggggcgctcgacggcgacgacagtcatgtggaaagcatcatttgtctgcgacttgccgttgtagttggtgtagccgccgccggtgcactccctgacgagcacacgctcggcgcggagacaggtgagtaggtcctcgtcggagaggtcgttgagctcggattcgggatagccgagggcgaggagcctttcatgggcttcgatcacctgtgcgtcagtgccggtctctttgggcgtccagtccatgcggtaggagccgaaaaacaggaagccacaggcaatgacgacagcgaggacggtgagcagcgaaccgacgagcttgtgatttgagaagcgctccttgacaggttcgatggcgcagccctgcgcggccatcgactttgcgagcttgttgaggcggacgaccaggtagaaataccagacgacgtaaacgccgagcagcaggggaagcgaggcaaacaatgccgccgcgacatagagcagaatgtaccagagcagcagcgcgcccgcggcgggagcagcgggcggcgttataccgacgtcgcgctgcatgtcgagcagaccttgccagaggcagaagagcagcgcgagccgcacggcggcggagccgaaagccagcgcagtggacaccgtgtctgccgcggcggtctcgcggcagacggcggcatcctgcccaagctcaacaaaaaggagcagcatgtgcaggtaggcgcagacatagcccgcgcgcaggaagccgttgacccgccgcagggcgcggaagccgacgagcaggcagaatgtgccgaccagcggcagcagcacatcgaggttccagaaattcagcgtcacgccggtgacggcgaggccgccggcgatcaagcccatcgcgcggcagaagggcgaatcgctcacatcgggcgtctctacttcgggcgcggagagcgagtcggccatctcctgcgcgggcgtgagggcctcggccggttcctcctgcgcggaagcatcggcgggcggttcaggcgggggagtttgcggcaaatcgggaaaaacttggtcggtcatgcgaattcctccttgacgttatgttaacagaagattacgagatcgagacaacgagccgccagacaggctcggccagataatagccgaggacagcggaagccagattggcggtgatcgcataggccgcggcgcggcccttgctgtggccggtgagaaagccgcagccggcgtagagatacagctcgacaagcaaaatgatgagttccgccggaagcagaaagaaaaagagataccaagcgctcacgccgctgtgtgcggtgacagatacagatgcaacggctaaaaagccctgtgtcagaacgttgacaagtaaaaacgcttcccagtttttcttccacgaatagcggaacagaagcagcagcgcgccctcgatgagaaacgtcggcacgagcgttgcgacaaattgcagcaagtagccggggatggttgagggaacggaaacggtgactgccgacgtatcgtccgaccagttgaccgtgacggacgattgcagaacgcggcgattgagtatatcggagacccagaccttgccggattcggtgacgaggatgatgcggtaggtgctcggcacaccgacgtagccgaaccagtgcagtgcattgccagaggcgtctgtgttctctgagtatagctcaccgtagattggtgcgccggtcgtgccctgcgccacgcaggcgtgccagcctgcgggcacgttgtcgcgcagaagtgctaagaggtcggggtcgagcgtatcctctttgccgtcgtagttccagtcgatgccgtcgatactgtttccatcttccgcgccccaatcacccttggcgagcaggtcgagatagtagggctcctgcggcgcgtttttgacgcgcacgatgagttggggcttcggcccgttgtcggcaaaggcaaaggtcgtgagcgcaagagacgcgaggagcgcgcaaacgagcacgcgaagagactttcgtttcatccaaatttcctccttttaatgttcggtgttccatcttccaatcgtatagacgcaaaagataacaaaaaagtttcatgcttttacaagttttatcataaaatgccgcgctgcgggaaaaagttctggcggggcgttgtacttttttcatattctgctacaatgggggagaaaaagaagcacattgggggaacgaacatgaaatggtatgcgatcggcaagacgctgacgccgctggaccgcgcgccggagagcggtgcggcggtggtgctgctgaattcggacgagttggcgcacgaaacggcgctgccggggctcgatgcggtgctgcaccatacgccgagcgcgcgggacgcgcacgtctgcaaggcggaggtgcgctccaactgtctgagcggaacgctcgcactgccgcgcggccgcagggacggcacgcgcctttgctgcggctatctcgtgacgaaggaccgcgtggtgctggtggacgacggagagatggtcgagccttatttgaaacgcatcgttaaggaaaaacgtctgacagaaaacagcgtcgggcgatttctctacgacttcttcgagctgctgatcgccagggacctgcaccgcctcgaggagatcgaagaccgcgcgacggcgctggaggaacgcgtgctcgcgggcgagctggaggaattcagtgccccgatgagcgagctgcgcaaggagacgatggcctggtaccgctactactcccagctcgacgacgtggcgtgcgagctgcgggaaaatgagaacggctactttttggacgaggagtgcagactgttccgattatttgaagagcgcgtcatccgcctgcgcgaggaatcgcagttgctacgtgaatactgcacgcagatccagtcgctgttccagtcggaaatcgacatccggcagaatcgcatcatgcagatattgaccatcgtgacgacgatcttcctgccgctgacactgcttgtcggctggtacggcatgaacttttccggcatgccggagctgcactggaagtacggctatcccgcgatcatccttgtgagcgtcgccgtggtggtgctgagcctgtgggtgtgcaaaaagaaaaaattctggtaagcaaaaaggaacggcgtgagccgttcctttttcttttgataggagtcactttttatcgaagtagtaatcgcggaagttgtggtactgcgcggcgtagtagcgcagcaggcgatagagtcgagagagcggcagatcacccttgcagaagagcgtgtgcgtgcccttgaactgcttgagctcgtcggagagctcctgatccttgacatagcggcgcagaatgccggtcggcacgttctgccagagggcgacggtgtggttgtagacgcagtcctcgcgcttgccgtagacgacatcgtcagtcaggagcttcatcatgttcagccccgcggcacggcagaaatagctgctgcggccaaggcgcgggttgatctcgaagagcacgtagcggcccgtgcgggagtcgtacttcatgtcgatgttcgaaaaaccgacgtagccgagcttttcgagaaactcctgcattttgtcatacaacgcctgatcgccgcgcgagatgatggcggcatagttgccgacggacttggggtcgtagtattcgagcaccggctggccgaggcacatcgcgcgcacatggccgtcaatgtccgaatagctgttgagcacgcgcaacgcgtcgtcgccgccggggataaactcctgcaaaatgagcttgccgcggtagtccgactggttcatgctgtggaccatcgtgaggtactgctcgcgcgtgtcgaagaagaagacctttttctgcccctcaaaatggcagcggagatagtcgagtgcattggaattctcgggcttgacgacgatgggaaagtcgaacggaagacagtcggcgacgctctcgcgatcctcgggagaggcgacgacggtcttgggatagtccatgccgtactgctcgcagagggcgtagaacttgtctttcgtgtcgaacgtttcaagcagctcatccgagatgaagcggttggcgatgagcccctcgaaatggtcgtagtggcggcagagaagacccgtgtaatagtctgagcaggggatgacgagcagcttttcatagtcctgtgcgcactgcttcagcacgccgagcagcgcgtcggggaagacctcctcgcgttcaaaatccgggatgatgcggcagagaaacaggtgcgagctgcgcgtgggcacgagctgctgcgtgcacagcagcagcggtgtgacgtgataggcctcctggaagagacgcgccgtgccgtaggcgttttcgtcgctgccgaggatgatgggcaaaaagtccttttttgcctttttggcgctgctcgccggcgcggcgggatggaccttgtcgtattcggcgaggtatttgagtgtgagctcgacgtcgctcgggtaggggacgaagacgctgccgcgcttcatcgttgtctcttctcccttgccggtcagcagaatgacgcgcgcgtccttgccgtccagaattgcgcggcggatgcactcggcgcggtcctcgagcacaaggtgcgggcaggcaacgtgcttttcaatgtcggcggcgatctgcgcgaacggctcttcgccggagtcctcttcggtgatgaagacgaagtcgcagttctgcccgctcagctcgccgaggtcttttctgcgctggagcgcgtgggagccggggcagccgaagacggagatcatctggcggccggggtattcgatcttcgtcgagcggtagagcgcgtcaaagctcatgcggttgtgcgcgtagtcgacgatgacggtgacgttcttgtcgcggctctcgtagatctgcatgcggcccgcggcgcgcgccttgcgaaggcccgagcgcacatactcctccggcacgtcgagcatcatgcagatggccatggcggcaagagcattggagatgttgaaaaggccgggcatcgtgatggaaaattcaccgttgtacttgagcgaggaaaccgtgaagtagagcccgtcgctgcgtttttccacatgccggcaggagacggtgtcgctctcatgcgagccgaacgtgatgaggttgcagcgatccttggcgtattcgatgacgcggtccgagtacttggcgtcggtattgacgcagccgaagcggcaggagtcgaaaattttgagcttggagttgaagtaatcctcgaagtccgggtgctcgatggggctgatgtggtcgctgccgatgttcaaaaatgcagcgacgtcgtacgtgataccgcgcacgcggccgtatttgagcgcctgggacgaggcctccatcacaagatgcgaaatgccgctttcataggcgttttcaaagtgctggtagagctcaagcacctcgggcgtggtgatgtgggactcctcggtgctcttgccgtcgtagttgtcgatagaggagagaatggcgcactcgggcatcgactgcgcgcgcagccagtcatttaagatgtagcgcacgtagtaggctgtggtgctcttgccctttgtgcccgtgatgccgacgcttgtgagcttgtccgtcacatggttataaaagagctgaccgagcacgacgagggaatagcgaatatcgttgacaagaagacagggcgcgtccacattgtgctttttctcggcgacgtaggcgatcgcgccgcgcgagagtgcatcgttaaggtattcttccttaaagtgcgcgcccttgcagatgaaaagcgcgtcctcgctcagtgcgcgcgtatcgtaggtgagacagtgaatttcacgcgcggcgagctcgtcgctcacggtgctttcgaccagaatgcctgcctcgtgcagtgcgtcgacatattctctcagtgtgtgaacggtattcataaatagctcctttgggtcttgctttttcggcaggacgggataaaatataggcgatatcgcgtcagatcgacacgatattggcaagcaaactcatttccgaagggggaaccaacatgacttatcagcaagtgctggaaaacgcaaggacctgcatcggcccttactgcaaggcgtgcaatgactgcaacggcaaggtctgccgcaacacgatgcccggccccggcgccaagggcgagggcacgggctttatccgcaacgcagaaaagtggcgtgagatctgcgtcaacatggacaccatctgcgaaaattcacaggtggacacctcattcacgctctttgaccggacgtttgagattccggcgttcgccgcgccggtgggcgcgatgcgtcttcactacggggacaaatacgacgatcttacatacaatgatatccttgtgcgcgcgtgcgcaaacgcgggcatcctcgctttcactggcgacggtaccgacccgaaggtcgtcgagggtgcggctgcggcgctcaagggcaatggcggttgcggcgtgccgaccatcaagccgtgggatatggatacaattcgcgaaaagttcgcgcttgtgcaggaagccgagcccttcgccatcgcgatggacatcgacgcggcgggcctgccgtttttgcagggcttgacgccgccggcgggcagcaaaagcgtggaggagttaaagcagatcgtttcctgggcgcagcgtccgttcattttgaagggcattatgaccgcccgcggcgcggaaaaggcgctggaagcgggcgcgagcggcatcgtcgtttcaaaccacggcggccgtgtgcttgaccattgccccgcgacggcggaggtgctgccggagatcgtcgatgccgtcggcggtaagctgacgatttttgtcgatggcgcgatccgtagcggtatggacatgttcaaggcgctcgcgctcggtgcggacgcggtgctcatcggccgtccgttcgtcaccaccgtctatggcggcggggaggagggcgtgcagctctacgtccagaagctcaaagccgagcttgccgacacgatgcgcatgtgcggcgcacactcgctcgcggagatcaagcgctccatgctgttcggcttctgacgagtatatattatatagtatagcactgcaagaaaaggctgacaagggaaaatcagaagaaggggacggcgaaattgagctgttcctttcttgctttcttttgctgtatataatattattgaaaatgggaacaaaattgccgcgctgaacgtctgagaaaatatagagccccttctaaaccgtttgatttggaggaaagtgcaatgaaaaaggcaacgagccgtatctggctcatcacactgacagcgctggcgctactttctctcggcggctgcgcgcaggaaaaagaggaaaataccgaagaaaacgacccgcaggcgcgggaggcgatcctgcaatgctgcgagttgatctttggcagcacgggagaaacaggcacttatcatatccgtgtgacggacgaatcagacggcgggcgcgtggatgaatacgactgcccacgcggtgcagacgagcagggctatggcaattcgcctgtatatgcgctgagtgaaccgtcgatgtacggcgacgagccgtggtatgcggcggcggagcaggactgggacgattgccgcaacggggtcgttgcggagatttcttatgggaaagatgcgatcgcgttcattccgccttggggagcgataaaaacagatgcggagtacgagcatccgggcggcaacgtgctgcggctgacgcaaaacggcgagacgacctattataaaagcaatacggcgcacgcggcgcagctcctcttcggatatgcacaggacgcggtgatggaaaagctgtacgacctgcacgttcccggcacagagacggactacgagaatatcgcaaacgagttctgtgcgcagttcgccgctggcctaaacgccgcgccgcgctggttcagcgggaaaccggatgacgcggcggcagcggtgaaggagcgcgtgttcgacgcgtattacggaacggactacccgaatttctgcttcggctttggcgtgatgatgcgctttgatgacccggagtcctcacagcgctatcaatgggaggccggcagcggcatgatcgagccgacgggcgaaggcgagtacggcgattattatggctggggtatggccgcggacgcgtgccgggatgaagcgggaaactggtacattgacggcacatggacgggcggcggcgcggtctggctgccgcagattggccgtagtctggattccggtcagcaggaggcgacggcggcgcagctcatagactgctggtttttgtcggcgggcgagtcgcacgagtggcggctccccaatatgatctacgcccgcccaggcgcagaactgcgcaaagcgtttgccgagctcacacccgaacaggcggcggaactggagacaggtctgcgcgccgtatgggacgatccgctgcatgcagagagttttccgggcggctttgacgcaaagtacaatgcagactgaaaagcattgatgtaaaaacaggtaccagtgctgtggaaaagcaacaggagagggcgggggagcggcctctcctgttgttcgtttcttgctgcctcaaaaggaatttgaagaaaaaacgaaaagtttggaaaaaactgttgacaaacgataaggtacgtgctaagataacacctgttccgcgaatggagcgtgcaccttgtaaattaaacaacgaaactttgacaagcaccagatgaaaaactgtgcgaaatgcacagagcttgcggaggaccggttaagtcaattacggtctgaagtaaggataaaaagttttaagctatgacaaatagctcgataaagattagctcagacttaggtctgtgttgataccattttattgagagtttgatcctggctcaggacgaacgctggcggcgtgcttaacacatgcaagtcgaacgagaatctactgaaagagttttcggacaatggatgtagaggaaagtggcggacgggtgagtaacgcgtgaggaacctgccttgaagagggggacaacagttggaaacgactgctaataccgcatgatgcataggggtcgcatgattcttatgccaaagatttatcgcttcaagatggcctcgcgtctgattagctggttggcggggtaacggcccaccaaggcgacgatcagtagccggactgagaggttgaacggccacattgggactgagatacggcccagactcctacgggaggcagcagtggggaatattgggcaatgggcgcaagcctgacccagcaacgccgcgtgaaggaagaaggctttcgggttgtaaacttct

SEQ ID NO: 24 - DNA, 557952 bp, Colonithrix sana
  source 1..557952: mol_type = genomic DNA
  misc_feature 196609: note = n is a, c, g, or t
  misc_feature 198220: note = n is a, c, g, or t
  misc_feature 557243: note = n is a, c, g, or t
  misc_feature 557634: note = n is a, c, g, or t
tccgaattcctgcatcgctgcatagatactcagatgttcttttttcatggtttctacaaccattctcttgaactccggcgtatatcgtttgtttggtactccttttggcatagcaaaacaccccacttcttagatagtatatcatactgtctaacaaatggggtgcagttcatccccatgcggcatggggaaactatttcctgtcagcgacagaaagaattttatccaccgctgctttcgcgccgccgcagcggaggaagctctcacgaatattctgcgcattcgcgcggtacgacggtgtttgcagaacggcgtcgaccgcggtgcggatggaggcggcgtcggctttttcgagcttgaggcccgcgccaagttcggcgacgcgggcggcgacgccgccctgttcgttcgtctgcgggaagagaacgagcggcacgccgaaataaaggctctcactcgcgctgttcatgccgcagtgggagaggaagacgtcggctttttgcagcacggcgatctggtcgacgtgggggagggcggtgatgttgtcgggaagtgtgccgagggcggaacggtcgatctgctcgccggtggagaggatgacctgatagggagagtccgcgaatgcggcgatacaggcgcggtagaaggggaggaggtcgttgttgactgtgcccatcgaaatgtagatgagtacatcgtgggccttttcgatattttctgccgcggggcggatggacgggccgacgaaggcgtacttgtctgagaacgtgtcggcgcagggctggaattcgggcgaggtgtagacgatggtgtcggtccggttgtcgttctggatgatgtcgaggacgtttttgatgggatagccgcggtcacgcaggcgctggagatcgtggttgatcttcggcatggcgagcagcattttgagcatctggccgccgctctgcttcatgaccttggcagaatagcggttgaaggcaaaggtcgtggtcgaggagatgaacgggatgccgagctttttggcgacggccttgccccagacagccatcgagtcggcaacgatgcagtcgggcgcgtaagcgcgcatgtcggcgcagaccatttcgtcgagggcgagggtggtctcgaccagaatgtgcgttgaaaaggcaatgtccttgccgacgcgcgcgccgtcggcgggcgtgaggtgctgttcgcagtcatacgggtcgcaggcgacgaattgcgcgcctgcggcttcgatgagcgtgcgcatgggttcgtaggagtagtagcggacctcgtgaccgcgcgcggtgagctcgcgcacgacgccgagcgtcgggttggtgtggccgtaggccgggatgcagaaaaagacgatcttgctcatttgctgtcgtccccgttgtccatttcggaaaagatgcgcagcatatattcccgctgcatggccttgggcaggatggcgatgccgcgctcgtcgtcgccgaggacgagcagctcgtcgccggggtgaaagccgaaaatgtcgcgcgcttccttggggatgacaaactgacccttttcgccgatcttgaccatccaggcgtgcttgccctgaggtacttccataaaatcaacctcctgaagtatgattagttatactaatcgtactacaaagcgtaaaaaagtcaagccagcaggcctgacttttttatttcaattcatggcatcggcgttgagctcgaagagaagctcgacgcgggctttgagcagcggatgatttttgagcgcggggtcagcggcgaggagctgctcggcggcggactgcgtctcgtgcaggagggataagtcgcatgagagatcggcgacgcgcagcgacggcaggccgtgctggcgggagccgaaaaagtcgcccgggccgcggagcttcaagtcctcttccgcgatggcgaagccgtcgcttgtggaggacatgaccttgagacgctgcttgttttcctcacccttgttgtcggagacaaggacgcagtaggacttgtgtcggccgcggccgacgcggccgcgcagctggtgaagttgggagaggccgaagcactcggcgttttcaatcagcatgagcgcggcgttcggcacgtcgacgccgacctcgatgacggtagtggagacgagcacgtcgatctcgtgcgcggcgaaagcacgcatgacggtgtccttttccttgggtttcatcttgccgtggatgggggcgatgcgaaggtcggggaagacctttttttgcagcatttctgcgtaggcggtgacggccttgcgctcatcggggagctcgtcgttttccgagaccatggggcagacgatataggcctgacggccctcggcgacgagcttgcgcaagaaggcgtagatgcgcgcatgatagctcgacgggacggcgaaggtgtcaatcttctgtcgtccgggggggagctcatttagaatggagacgtcgagatcgccgtagatcatcagcgcgagcgtgcgcgggatgggcgtggcggacatgacgagaaggtgcgggtcatcgcccttggcggacagcgcggcgcgctggtcaacgccgaagcggtgctgctcgtcggtgacgacgagcccgaggttttggtactgcacgtcaggcgagagcagggcatgcgtgccgatgacgagggagagctcgccggaccggagacgttcgttcagcgcgcggcgctccttggccttggtcgaggcggtgagcagcgcgcaggggatgccgagtggctccaaaagcggggcgagcgagcggtagtgctgctcggcaaggatttctgtcggggccatgagggcgcattgaagaccatttttcgcggccatgtagatggcggcggcggcgaccatcgttttgcccgagccgacgtcgccctgcacgaggcggttcatcgggcgcttgccggtcagatcacgggcgatatcgccgatggcgcggcgctgtgcgccggtgagcgagaaaggaagagaagagaaaaaggggagaaggtcgacctttttgcactgctttcctgcgacgaacgtgcggcgctcgcgcaggagcttgagaccgagcgcgagcaggaacagctcttcgaacgcaaggcggcggcgcgcggcggagagggcttcgtcgtctgtggggaagtggatgttttcgtaggcaaagcgggtgtggcagagctggtaggcgaggcggacgtcctcaggaaggatgtcaggaagttcgtcgacgcaggcggcgaggccctgctcgacggccttgcagagcatcgactggctgacgcccgcggtgagcgggtagatgggcatgatgcggccggtgatctggtgcgcgccctcgcgctcaaagaggggattggtcatctgcgggcggctcggcgtaccctcggcgcggccgaagaagacgtaggcgtcgccggtgtggaaggtgtttttgaggtaggactggttgaaataggtgagctcaagtgcgccggtttcgtcgacggcgcggagcttgacgaggtcgagccccttgcgaatgcgcgagagcttgggctcgcccgcgatgacggcgcagacacaggcattctcgccggggatgaggtcggcgatcttcttgtacgcgcggcggtcgtcgtaggcgcggggaaagtaggaaaggagggagcgcaggtcggtgatgccgagtttggcgagcgacttggcgcgcgcttcgcccacgcccttgatatagcggatatcggtgttgagcgtcgccatgcggaggaccccctttacaaatgcggtatctatctattataatcaacttggatgaaaatgaaaagaccctttgcaaggatgaagaaaggagtattgtcatgcagaagaaacattccggaaagatgggcgcgatcgcgctgccggtcgcgctgatcgccgcggcggtcggagtcctcttatggatgctgaccggtgcgcagggataccgcgcggcggactggatagacacagacgggcagcgctactaccgcaacctggtgacgcatcaagcctttgcggcggacgttgactgggacgggagcgacggcgcggtgatcgtcattcccgatgaagtgcacggctataaggtgacggcgctcggcgggtatatcggccgcggtgtgccgacggcgtttgcgctgaacgcgccggagatatggaatacccaggtcgtcttcggtgacgaaaaagttgcggcggacgcggaaaaggactatccgaacgcgaagatcgtcgactgcacggtgacactgcggcttgggaggaacgtgaaagcgctgaacgaggtcagctgcttcggctggcagggctatgacgaaaacggagccgagacagtgtggcgtctgcgctggaacgtcgaatgcgacgaggggaatgagacgttttacgccgagggcgggcggctgtatcgctgcgcggatgggacggctgtggaagcgttccgctgcgcgtgatgcagcgcgacagcgatgcgtgcttttccctgcgtacccgcaggggtgcggcaaagggggccattctctcgcgtgagagaatggccccctttagatcccccaagagaacgcaaggggccttgccccttgacctcgcacattggcagtttttatcttgaagaactgcacgcgctgcgcaatcaggtgcggtgtacgtggcttcgccacgagtctctgcgagtcggttcattcagcaaccgcgccttactatcgtgaggcgcgagtgacggtggaccggcggcagactgcctgcgggcgcggcattgctgcgctcgccgcgcttttcagtcttctgctggaattagtttgatgtgggcaatgtagtatttggcggggtctttgggtgggggtggtttgagagtaaaatcttcacaggcgggggtgtccgcctctcgttttttgcagcgcctgctggtgcagtgaccgtagtacaatgccctgtattctccatcggtaaagatataatgtctgcgaaaatgctcgcaatcattgcaggtttgcttctccatgaaatcacctcaatgctcattttaggacaatatgtccaaaaagtcaataggacatattgtcttacgatataatcgcagtggtgatgtaaatgaagttacggattcgtgatttgcgggaggataaagacttcacgcaaaagcagatcgcagaatttttgatgtgcgaccagtcgctctattccaaatacgagcgcggcgagcgagcgcttccgctggaatacgccgggcagctcgccggattctaccatacaagcatcgactatctcgtcggcctgaccgacgaaaaagaaccctatccccgcgagaaacgcaccacctaaccgcggcgagcgcagcaatgccgctttggcaggcagtagcaagatcgtacaaatccaaagtagacggagattaggctgcacctccacaagatcagcagagcggcacccgcaaggggtgtgccgcatccgtaaggcagcagagctgccaacggctgcgcaacagcggataataggagagagtcaagtcgtatagcaacaccaaacgcggcgaagccgcgcgcaggcatttgcattccggaggcataaaggctgttcgagcctcagactgccaatcgaaacctttctcttgggggatttaaagggggctattctctttcgtgaaagagaatagccccctttgcctcgtgcagcgccaacggcgctgcttccgcatgccctttagggcgcaaaaaaagaggggccaaggcccctctttttacttgcggacatagtcgacatagcggaacttgaggccgttttcctcaaaggtctcgctctccgactcgatgcgccagtcgggattgtcgtcgaggttggggaagaagctgtcggcgtccgggtcggcgtcgaccttggtgacgtagacgcggtcgcagcgggagaggagcgccatgtagacgctggcaccgccgatgacgatggcgtcgtcgccgccgagggcggcggcctcgtcaaacgagtgggcgatctctgcgctggggacgtcgaggtcgcggtgggagaggacgatgttgcggcggtccttgaggggcttgccgccggggaaggtgtcgagggtcttgtggccgaggatgacggtcttgccgacggtgagggtgcggaaacgcttgtggtcggcagagatgcggaacagcagcgcgccgtcgcggccgatgccccagctctgggaaacgcagacgattgcggtcatagtatcaactccatggctttctctataaattttgccggcgcgaatgctcaaacggcaatggggatcttgtcttcaaagggactgaattgataattttccagccggacgctgtcgggggtgaaggcgtagaaatccgtcacggcgggatcgagggtgaactgcggggcggggtgctccggctcggagagcatcttttcgatgatggggatgtggcggtcgtaaatgtgcgcgtcggcaatgacgtggacgagttcgccgactttgagaccggagacctgagcgaacatgtggacgagcaccgcgtactgacagacgttccagttgttggcggcgagcatgtcctgcgagcgctgattcaggatggcgttcagcgtgccgttcgagacgttgaaggtcatggagtaggcgcaggggtagaggttcatgtcgtgtaggtcctcgaaattgtagaggctcgtgaggatgcggcgcgaggcgggattatgtctgaggtcatagagcacgcggtcgacctggtcgaacataccctccttgtattggtgcttgacgccaagctgatagccgtaggccttgccgatggagcctgtttcatccgcccaggcgtcccagatgtgggaagagaggtcgtggacgttgttggactttttctgccagatccagaggagctcgtccaccgcgcttttgaggtatgtgcggcgcagggtgaggatgggaaactccttttgcagatcgtagcggttgacgaggccaaattttttgatcgtgtgggcgggggtgccgtcctcccagtggggacggacggtgaggtcgtcgtcgcgcacgccgttttggagaatgtcgaggcagttggcgcgaaagacctgatcggcgtagctcatgcgcgtctcctcacttggtttcgcagcccgcggcgcggacagcggcgagcgccagctcaagcgtcgggtcgacgttggggtaatcgagatgatagatgtcgaacgcgggggggagctcggtgcagccgaggatcaggacctcggctccgcgcgcgagcagatgctcgcaggcggagcggaaggcggtcgcgtcgtgcgtgaggtcgccggccttgacgccgttgtagatgatgtccatgacggcggtctgatcttcactatgatcgggggtgaggagctcgacgccgctgccctcgaacgtgcgctggtagatgccggtctggacggtgccgtcggtcgcgaggagaccggcgcacttgatgccgcgggacttgagcgcgtcgcgcgtgatggcgatcatgtgcagaacggggatggagacggacgaggcgacggcgtcataaaagttgtgcgcggtgttgcagggcataatgagaagatccgcgccgatggactcgaggcgctgcgcgctcttgaccatttcggggacggggtcggcgccaccgtgcaggagggctgccgtgcggtcggaaatattggtattggagtcgatgcacacgcgcggatggtcctgatcgcaggaggcagccgtgtgcagggtgatcttctgaaagaggtcggcggtagcgagaggacccatgccgccgaggataccgatgacctttttatcactcatggagaagccccttttctttcttttcgagcagcttttgatcgtgattcgggagcgcggcgagctcgcggtcacgctggatgatcttcttgagaccttcgacggcgaccttgacggaggcggaggtgtcctcgctcatgtcctgatcgaggccggccttttcgcgctcctggttccagacaacgtggaagcaggagccgcagcggcagccgagcgcggaggcgacgacgaacattgcggcggactccatttcgcttgccttgacgccaaggcgcttccagctctcccacttttgcagaagctcgtagtagacggggctcttttccggggagtgctggccgtagaagctgtccttgcactggacgacgccggtgtgggtgcagtagccgagctcttcggatgcctgacgaagggcgagggtgatgtcgaaatcggcgacggcggggaactcgatgggcgcgtattcgagcgaggtgtgctcgtagcggatggcgccggtggcgacgacgatgtcgccggacttgacgtttaagtcaatgccgccgcaggtgccggtgcggatgaaggtgtccgcgccgagctgatgcagctcctccatggcgatggaggcggacgggccgccgatgccggtggagcagacggagaccttttcacccagcagcgtgccggtgtaggtggtgtattcgcggttctgcgcgacgagatgggcatcgtcgaacagcgcggcgatggaggggcagcggccggggtcgccgggcaggatcacatagcggccgatctcgcccttggcgcagtggatatgatagagacgttccagttcatgcatgatgacagcgctccttatctataaaatcattcaataattatatcagaggagaagagggggcgcaagggtgcagacggagagatatgagcaaaaacggggttgcgctttgtgcatgaagcagattataataaggcaacaaaataagaaaagaggaagaatatgagctataaagcggttctttttgatatggacgggacgctgctcgatacgctggaggacctgcgcgacagcacgaaccatatactgcagcagatgggctatccagagcggagccttgaggagatgcggcgctttgtcggcaacggggcggaaaagcagatccgccgcgccgtgccggaggggacgagcgaggaaaagatcatggagacgctcgcggcgtaccgcgcgtactatcaggaccactgccagatcaaaacacgggtgtacgacggacttttggacatgctgagcgagctgaaggcaaagggcatcaagctggcggtcgtgtcgaacaagccggacagcgcggtgcagaagttgagccgtgagtatttcggcgaccggatggactttgccgtcggcccgagcgacggcgtgcgctgcaagccgtaccccgacatggcggaggaagcgctcaaggcgctgggcgtggagaaaaaagacgcggtgtttgtcggagattccgaagtggacgtgcagacggggctgaacgccggactggacgtcatcgctgtgagctggggtttccgctcgagggaagttgtgatcgaagccggcgcgaagatgatcgccgatgatgcgggtgagctggaaaagctcattctcgaatgattgtctcccatgctgggaggggattcccctgcgccgcgcaggggtgcgaataaagggggccattctctcacgtgagagaatggccccctttaaatcccccaagagaacgcaaggggccttgccccttgaccccgcacattggcagctttgggcttgaatgactgcatgcgctgcgcaatgtaagtgcggtgtacatggcttcgccatgaatccctacgtttcgttacgtcttgcaaccgcgccttactaccgtgaggcgcgagtgacggtagaacggcggcagactgcgtgccgaatgcggcattgctgcgctcgccgcattgagtagtaccccgttagacggaaattactgtgcacttctacaagatcagcagagcggcagcggatgataggagcaggccaaatcgtttagcaccatcacctggcaggcattttcattccggaggcataaagaccgttcaagcctgagactgccaattaaaacctttctcttgggggttcaagggggccattctcttttgcgaaagagaatggcccctttttttactgccgcgcggtgcgcggcattttttgcgcgcaaaattttgcgcgcgtgcatacgactgtgcaacaaaacgggtgcggcggggttcgggtgaaaagagaaaacaaaatggggggacacgatggagaaaaaggagctggggcgcgaggatgtgattgaggcgctcaagaagatcgcgttcggacgggtgaaccggggcgtggaactgacgtatctgagcgagccgacggcgcagttgatccgcaagatggacttgtcggcggtggcggaattcaagagaaacgccaacgggacggtagaggtcaagttcgtcgaccgggtgaaggcgctgagcgcgctttacgagatgctggggacgggggacgcgaacgaggcggcggagttcttggaggcgctggagcaggcgggagaggagagagatgattggcggccgtgaagcagttttccgccaagcagaaggcggcgatgacctggtgggcgaaccccaagtacaaagagtacgacgcgatcatctgcgacggggcggtgcgaagcgggaagacgctgtcgatggggatgggctttttcctgtgggcgatgcggcgctttagcggcgagcaatttgcgctgtgcgggaagacgatcgtgtcgctgcggcgaaatgtgctgcacgagattttaccgaaggtgacggcactgggctttcactgcgaggagaagcggagcgagaatttagtgatcgtgcgaagcggcggacgggagaaccgcttttacctcttcggcggatacgacgaggggagcgcggcgctcatccagggcgtgacgctggcgggggtgctgttcgacgaggcggcgctgatgccgcgctcgtttgtggagcaggcgagcgcgcgatgcagcgtatcgggcagcaagctgtggttcaactgcaaccccgaggggccgatgcactggttctaccgcgagtggatcctgcgcgcggaggagcgcggggcgctgtatctgcactttacgatggacgacaatccgtcgctctcgccgcgcattcgggcgcggtacgaaaaggcatacagcgggacattttaccggcggttcatcctgggcgagtggacggcggcgaaggggctcatctatgacttcttcgcgccgcaggagtactgcgggcgggtgccggaaaagccgtgggagcgggcgaggatctccatcgactacgggacggtgaatccgacgagttttggcctgtgggcgctcaaggacggggtgtggtaccgggtgagggagtattacttcgattcgcgcagagaggggcggcagaagacagacgcggagtatgtggcggaccttaaaaagttcacagcgggggagacggtggaaaaggtgatcgtcgacccgtcggcggcgagctttatcgaggcgctgcggcgcgagggcttccccgtgagcaaggcggacaacgatgtggcggacggcatccgcgtgacggcgaacctattgaagcagcgaaagatcgtgatctgcgagggctgcgagagctgccttgccgagatcgcggcgtattgctgggaggacagcggaacgggaagagaccggccgaaaaaggagagagatcacgcgatggatgagatgcggtattttgccgtgtcgatcgcgaaaaaggaacgcggaggcggcattgcgatgcgctcggtggagcgcgcggcgcgatgaacaaaacggaaaaggagaggacaggatgaaagtaccctggcagaaggagagaagcacgggcggcgagaccgccgtgcagctgcgcggcggcggacgcagtacattcggacggcttgagagctatgtgccgctgctggacggggagacagcgctgtaccgcgaggtgcgcgaggcggtgccggtggtggacgcggccatctgcaagctgatccggctgacgggcggcgtgcgcgtggcatgcggcaacgagcgggcggagcagggcttgcagcgctttttgcgcgaggtaccggtgggcagagggcagaggggcatcaacgcctttttggactgttacctcgattcgcttttgacctgcgggcgcgcggtgggcgagatcgtaccggacgcggaaggacgcgagatcgcggcggtgctgtgcgcggacgtttcgcaggtggaggtgcgcgagggggacaatccgctcgaattctgcctgtgcggtgtggatggcggcgggcgcagcgtgccgctcgagtatcaggacctactgctctttacaccgctcaaccccgaagcggggcacccttacggcgtttcgatgctgcgctcgatgccgtacttaacggggctgctgctgaaaatttacgacgcgatgggaaagaactgggaccgctgcggcaatgtgcgcttcgcggtgacctataagccgcaggacggcgagctcgaccgcggggcggcacaggagcgcgccgagcagatcgccgaggaatggtcgcgggcgatgcaggagggcagaaacggcagcgtgcgcgactttgtatcggtgggcgatgtatcgatcaaggccatcggcgcggacaaccagatcctcgacagcgagacgccggtacggcagatcttagagcagctggtggcgaagacggggctgccgccgtttatgctggggctgagctggtcgtcgaccgagcggatgagctcgcagcaggcggatatgctgacaagcgagatcacggcgctgcggcgcacgctcgaaccggtcatcgagcgcgtctgtacgctgtggcttaggatgcacggctacggctgccgtgcggtggtggactgggaggacatcaacctgcaggatgaggtggaggaggccaaagcggcactctacttgcagcaggcgcgaaagctcaggcaggaaaatgatgaagcggaggggaaatgagcatggaagtgagaaaagagagcaatgggctcaaaaacagcatggtgacgcgcgaggaactggcaatcatcaatcagttcacgaagcgcgcgctcaaagaggacgaggtctacacctttgctgtgcggctgtgcgacaacgaggtggaccgggacggcgagcgctttccgcgcgcgacgctcgaagagctcgcggagctgtttgtgggcaaaagcggcatttttgaccacgagtggacggcgaaggggcaggcggcgcgcatctaccgcacggagatcgtggaggaagagggcgtttgctcgcagggcgaggggcgctgctatctcaagggctatgcgtatatgctgcgcggcggcgagaacgatgcgctgatcgcgcagatcgagggcggcatcaaaaaggaagtgagcgtggggtgcagcgtggaaaggtgcgtgtgctccatctgtggtgaggacatcaacacctgcgcgcacaaaaagggcgaagtgtacggcggcaaggtgtgctgcgcggagcttgtgaacgcgcaggacgcgtatgagtggagctttgtagcggtgccggcgcagccgagagcgggcgttttgaagcgctgcggcggagaggacgcgggcacgctcaagacgctcgtcaagcggcgcgggtcgagagcgaaccagagagagcttgaaagccttgaaaagcaggcggaggtcggtaagcgctacttgagtgagctgcgcggcgaggtgaagcggctgatgctcgtgtgcgagcaggaggcggatggcgaggccattgaaaagctcgcggaaaagctcgacgagagcgagctcaaggagatggagaagctgtatcgcgggaagatggcgaaaaagctggggctgcgcacgcagctcacttacggcgagaagacgaaagcggcggaggacgagagcgactttcgcgtgtgaaaaggaacaaaaagcagcggcgctttttggatagaacaacagatcaaggaggaacggtatgagcatttcttatgagggcatcggcgagtggtgcgcaacgtttgtttgcggcgcggtcagcgagggcgacattgtgaaggtgagcgcgaacggcacggtgggcaattgcacggcgggcgacggcttctgcggcgtggtgcgcgccgtcgcgcatgacggcaaggcctgcacggtgcagctcggcggccttgcgagcgtgaagtacagcggcacggcgcctgcggtaggctttagcgagctggtggcggacggctcgggcggcgtgagcaagccgggcgacaaccagaacggcagcagctatcttgtgctgagcgtggacagcgcggcgggcaaggctgtcatcaagctttaaggaggagaaggacaaatggcttatcagtatgaaaatgtgaagctcgaaaagggtatgtacggtcaaagcggcaagagctttctgaaggtgctcgaatcgctcgacccgagcgagaactacaagggcacggcgctcgagggactcgacgccttccagcgccagctcaagcgctttgatatccacgtcaagggcgcgggcagcgacatggtggaaaagtttttccacacgagcgaatcgtccgtgctgttcccggagttcgtctcccgcgtggtgcgccagggcatggaaagcgacatcctgcccgacatcactgcgaccgtgacgaattttgacggcatggactaccgctctatcgcgtccgttccgacggatgacgacaaggagctcaagcgcgtggaggagggcgcgggcatcccgacgaccagcatccgcacgcaggaaaatctcgtgaagctccacaagcgcggcagaatgctggtcgcgtcctatgaggctatccgcttccagcgactggacctcttctctgtgacgctgcgccagatcggcgcgtacatcgcgcgcatgcacttaaaggacgctatcgacgttttgatgaacggcgacggcaacaacaatgcggcaacaagctataccatcggcgatgacggcatcggcggcacgaagggcacgctgagctatgacgcgctgctgggcttctggtcgcagtttgacccctatacgatgaacacgatgctgatgggcagcgacatgatgctcgcgatgctcaagctctcggagttccagaacccgctgacgggcctcaacttccagggcacgggcacgctcgcgaccccgctgggtgcgaagctcctgcgcacgagcgcgatgcccgcgggcaagatcatcggccttgataagaactatgcgctcgagcgcatctgtggcagcgaggtgctggtcgagtacgacaagctcattgaccgccagctggagcgcgcggccatcacgagcatttccggctttgcaaagccgtatcaggaggcctcgaaggtgctgtccttacagtaaaaagtaaggaggaagagcgaatggcggagagcatgagcgagcagatcttttcgatcgcgtgtgcgctgagcaaggcggacgagagcgagaagagcatgctccgaatgatctgcacggcgcaggaggagagccttgtgcgcgcgctgaaagagggcgtcgccaaggaggactgcgagagcgcgtttatctgcgcggcgtcgtggttggcggcggccacgctggagagcgcgagagcgggcggggaggagttctcctccctgcgcgcgggagatctcacggtgacgaagcgttcgtccgatgaggggagcaaaaggctgtcgctgctgcgtgagcaggcgtgggcgctgatgcgtccgtatacgacggacggcgggttctgcttccgcggggtggaagcatgaatcgggcactgagtgaggcgttcgcgcgctatggcatgagcgttttggtgctgcacggcggagagacggcggagacgaaggcgtttttgcagcttgtgaagaaggagaacggcgaggagccgttctctgtgacggcgctgggagcggtcgacgagcagtgctggcggtatctgggcccggcggacgttgcggtcgcaatgggcgactttgtgcagtgcggagagaagcggtatgtcgtgcgcgcggcggggccgttttacgtgggcgaggagatcgcctactactgggcgatgctgcatccgaaggaggaagaggcatgacggcggtcggacaggtgaagcgcgcggtggccgcggcgatcgaggcggcggggtgcgcggcgatcgagagttacagcgaagaacagctcaagcggtatgcgaccgcggtggcggcggtcggcacgaaggagacggtgatcgaggagagcggcgcggcccagtatctgggagaaaaggtcgacgaggcgacgcaggagacggtatctgtctacgggagaaaaatgctgctgacgctgctcatcgaggtgtatgcgccgaggacgctgggcgcggcgggctgcgaggaagcggcggagacgatcacacaggcgatgatgacggcgctgccggaggggctgaagctcagaacattgcagtggggcaagaccggctgggacaagacgacgggaatgttccgactggatgcgagcgcgaaatatgcggcatactttgtcgcggaggcggcggaggatgggacggtgtttaccgattttgtattgaaaggcacggtgaaagaacgtgaatagtacgatccatgagcggccgggcgtgtattcgtcctacgacgcatcgagcgtggtgagcgcgagcgctgcggcgaagacgatcggcgcggcagcggtggcgacgaaggggacggccaataaggtggagctcatcacctcgtatgaagagggaaagagcgtattcggggaggatgcgagcggcgtgtatggcatgagcacgctgctcaaattcctcttcgccaacggcgcgggtgcagtgaaggctgtggccgtgggcaaggacgagagtgaagagaaggactacgcgagcgcgtttgcggcgctctctgatgaggaagatgtcggcgtgatggtgtgcgacagcgcggcgcagagcgtgcatctgctcctcaaaacggcggcagaggatgcctcggcggcgagacgcgagcgcatcgcggtcatcggtggttcggaagagacggtcgcgcagatggtgaaccgcgcgaaggctgtcaacagcgagcgcgtagtgctggtgggaccggatatcgcatcggacgacggcggtacgatgagcgcggtgtttgccgcggcggcggtggcggcggtgatcgcgggaaacaccgacccgtccgtgcctatcaacggcgcggagctgacgcttttcggcgcggcgggcaagagactgagtgacaatgagatcgaccagctggtgcgcggcggcgtgacgccgatcgagacggtgggcggcgtttcctcgccggtgcgaggtatcacgacgaagacttcgagcggcggggcggcggacacgacgtggcgcgagctgacgaccattttgatcgtggatgaggtcattccgacgatccgcagcgcgctgcgcacgcgctttgccagaagcaagaacaccgcgcagagccgcggggccatccgctcgcaggtggtgctggagctcgaagagatgaagagccgcgagatcgtggacagctacggcgaggtgctggtgagcgcgctcaagagcgacccgacggtgtgcctggtggaattcagctttacggtggcgcacgggctgaaccgcatctatctgacggcgcacatcacggtgtaaggaggaaaaatatggcgaatacggtattgccgctgagcagcgacatctatctcgaagtcgacggcaaaaaggtggcggtggtgcagagctacacgacgagagcgacgcgcacgagccgcgagatcgaggcctttggcgaaaacgagccggtggcgacgatcgcgggcgcgaacaagtacacgctggagttgagccgcctgtacgcgacggatgaggccatcagcgacggcatcaacttctatgatctgaacgacttttcgcttgtgatctgcaagccggacaagcgcatcatctactcgcagtgccgctggagcagcattgaagaggcgggcaagctcggcgacccggcggcggagaaggtgacgatcatcgcgcgtaagcgcatggagatcgcaagctgatggacgagcttctgatgaactttttggggcgcgagcgggagaagacggtgcgcatcggggagagaacgtgcgcgatgcggctgctttcggcccgcgagacgctctcgctgcggcacgagatcgcgcagcttgactgcgccgacgaagaagagcgtgcgttgcgcgcgaacgcggcgctgctcaaaagaagcctgacggagggcggagaggcggcctttgcaagcgcggaggacgttgaaaatgcactgagcgtcggcgagatcaacgagctggtgcggtgctacgcgctgcttgacagggcggagaacccgtcgagcgaggacgggcgcgagaaggtggaagcgctaaaaaaagcatggagcacgcgccctacgaacggctgaaatggcgtgtgctccgatatgccggcgcgctgccgagcgaaaagcgcgcgcaggagatgacggacgcggactacctctattgccttgtgcacgagatgctcgaccgcgaggaggcgatggagcggctgtgccccgagtgccggacgcgcgcggaggaggcacgatgcagcatttgcggcgcaaagctcggcgaggccgcaggcggcggcaacgcgagctttgatatggcgcgctttatccgcatgaaggaggggcgaaaaccttgaattacatcgaatgggcgctgcaaagaggcgcagagctgtggcgcgcgcgggaagaggcgctgaaaaagcgcctctcccttgtgccagaggggacggcgcagaaaaaggcggcggaggcgcagctttcggaagaggaagccgcggcgcaggatgcggagatgagcggcggcgcggaaactgtggcagaagcagcggatgatccggtggagacggcggcggtgcggcttgggcaaaagctcgggctgggtgcgacgcaagaagatgatggctcggagagggagacagcgttttctgccgatctggcgggcactgcggcggcgaacgctgcgcttctgcgcgcgagggaggccgagagcgcggacaatgcgtccgactggataagaaagctcctgagcgcggacggccgcgacggggcgagcgcggcggcagcgcgagggaaaaatgacttttcactcgcgcaggagcaggaggtgcatgagatggagtcgttttcgctgagcttagagcgcgacgcgcgccgatacgatggcggatttttattttactgagaaaggggcgggaggatgaaccttgcaccgatgcgatacaaggattatgtctggccgcacaacccagagacctacaccatctcgttcaagcggcaggtggcagtggcgaaggtgccgttcgggcgctacgggatgcaggatctcggaatgagctaccgcgtgatggagggcgaaggcgtttttgcggggaagggcgcctacgacgagttcaaaaagctggcatcggtcttctatcagggcgggccggggctgctgatccatccggtgtggcaggcgtcgcaggcgtactttgtgttgctggaactggcgcagcagccgcttgaaaactacgtgcgctaccgctttgccttctgggagacgagcccgctcgatacgtcgctcatccgcgtgagcggcgggagcggcaatgcgggcacggggacgaaaacggcgagctcgtactacacggtcaagcgcggcgacacgctgtggggcatcgcgaacacgtatggcgtgacgctgacggcgcttttgaacgtgaatccgcagatcaaaaatcccaacgggatcgccgtgggagagcgggtgacgctgccgtgatgaaggggtacctgacgacgtgcgacggtgcgcagtttgagctgccgacgctgctgaagtgggaattttcctacacgggaagcgtgccgtgcgacagctttacgctcaagtgcgcgtatgagcccgcgatggcggaggtgctgcggcgggcggtgcgcttcacggcgagagaggacggcacggtcgaatttgcgggcgttgtggacgagtgcggcgtgacatgcgatgaaaagggcttgcagcttgaggtgagcggacgcggcatggcggcgctgctgctcgacaacgaggcagagagcgtgagctatcagtgggcgacgatggaggagatcctcaaaaaccatgtgacgccgtacggcattgtgtgcacgggctatgacgcggtgacggctgcggcacggtaccgcgtggcgaacgggtcgagccagtggaaggcgctgaacgattttgcggcgctgcacggcggaatcgaaccgtatttcgacaagacgggcgcgctggaggtgaagaaaaaccgcaaggccgcgcgcgtgagcatcgatgccaaaacgccggtgacggcgctttcctactgcgataagcgctacggcgtgatcgccgaggcactggtggtggacagcaaggcgggcgtgaagcagagcgtgaaaaacgaggcgttctgtgctcgcggcggcacgagcaggcgcgtattttacgtgccggcgcgcagcggcacgcaggcaatgcgctacacgggggagtatcagatcgcaaagtcgaaggagggcgcggagacgctgcgcgtgacgatcgcggggcggttcaccgccgcgccgggggatatcgcggcggtgagcgggacgaagatcggcatcgcaggccatttccgcgtgatcgagtgcgtgaggcgctttggcgagagcggagaggcgtgcgaagtgacgatgcagagggagtgagagacgatgtggctatcgagaaagctaagccagcatgagatgcaggacgtggcctcggcacaggacggaacggtgacggtcgagggcggcgagctggcggtgttcagcagcggggaaaagcgcgaggtgaagaccgccgcgcccggcggctatgagtggcagccgaaaaagggcgaggatgtgctggtggtgcgcggcgggacctttggcgaggaggcctacgccgtgggcgcggtggggcagagcgcggacgacctggcacccggcgaggtgcgcattcgctccgccgcggcggggacggagatcgtgctgcgcaacaacgggcgcatcgacatcaacgggctccttttcatcaacgggatgccgtatctgggaatgggaggctgaggatggagctgaagatcaaagaccgcgattatgtggccgacggcgcgggcgggctcgtgcgcgtgagcggctgggacgagctgctcgaacgcgtgctctttaagctgagtgtgcggcgcggaagctttgcgctcgcgccagagcttggcagcaagctgcaccttttatggcgggaaaagggcgagagccgcgcgacggcggcaaagcaatacgtggccgaggcactggcggatgaaaagggcctgagcgtgacgggcatggagcttgcggaaaagaatggccttttggagctgcgcgtgctgctgcgctatgagaacgaaacgggcgaggcggtcgtgacgatagggggagagtgaagaatggaagagctgaacgcgatctacgagcggatgcgcgcgatctttgccgaggaggcgggctttgtgccgaacgacggctgcgacgcgatggtgcgcctctatgcgctggcgagcgaggtacagtcgcttctggcgcaggcggactgggtgctcgatcagagctttccgcagacggcggtggggcagtatcttgattatcacgccgagacgcgggcgctgacgcgccttcccgcggcgaaggcgacgggtgtgctgcgcttttccgcgccgtcggcggcggtgacggattatgagatcgagcaggggagcgtcgcgatgacgagcggcggcgtgcgctttgagacgacggagaaggcgacgcttgcaaagggcgaaacgtatgtggatgtgccggcgagcgccgtggaggcgggggcgagcggcaacgccatcgcgggcgcgatccatctgatgtccgtgtatccggtgggcatcacgcagtgcacaaatcctgaggcgttttccggcggcagcgacgaggagagcgacgaaaagctgcgcgagcgcgtgctcgagagctacaagcgtttgccgaacggcgcgaacgcggcgttttacgagcaggaggcgatgagctttccgaacgtggcggcggcgaaagcggtcggccgcgcccgcggcatcggcacggtggatgtgtatgtttcgacgcacgcgggcgcgccggatgagaagctgctcggcgagatcgaggcggtcttgcagaaaaagcgcgagatcgcggtggatgtggaggtcaaggcgccgacagagaagaccgtcaacatgagcgcggagctgacggcggagcagggctggacgatgcaggagatcaccgatgcggcgacggcggcgctgcaggcgtacttcaccggcgagcggctgggtgaagcggtgtatacagcgaagctcgcgagcatcctctacggtgtggagggcgtgaagaactgtcacctgctcacgccggacgaggatgtgagcgtgagcgcgacggagctaccggtgctcggcacggtgacgatcacggagatcggggcgggtgaggcatgatgtattatgactatctctgccgccttttggagccgatgcgcgtttatcgtaccgagcgcggcacgctgagcggcggagagctgtacgcagcgggcaaagcgctggataaagcggacggcgcgacggaatacgccgagcaggagggccttttgcagacggcggagggcgagggccttgcaaggcgggagaagctcttttcccgctgcccggtcagcgtttcgactgcgctgcggcgcgaggccatcgcggcgctcgcgcgcatcaacgccgacagcttcacgctggatgcgatcaactcgacgctcagcggctgcggcatcaaggcactggcggaggagacggagaaaaaggggacggtcaaggtctggttcccgaacaccgtgggcgtgccggatgagttttcacaggtggagagcatcatcctcgatatcatcccgtgccatttgctggtggagttctacttccggtatctgacgtggctcgagtgcgagagagtgggattcacgtggcagagtgtggaggacgcgcaccacacgtgggagagctttgaaaaggcggtgccggaggaagaatgacggaacaggagatctcggtcaagctgacggagaccgagcagcgcgccaagtcgaacacgcaccgcatcgaaaagctggaacagcagcagaaggacctgaataagctggtaacggcagtggaggtgctcgcctcgcgcgaaaagggcgtggagacggacgtcaaggagatcaaggcggacgtgaagaccatcacgcagaagggcggaaagcgctgggatgcgatgatcgaccgcgtgctgtacgtgctcatcggggcggcgatctccctgctgatgacaggggggagcttatgaaaaggaaacgcacgagcttttccaaactgttgctgctgctcgaaagcgcgatcgtgctctatacgacgtatcagggcttcgggatcgcgaagctcgcgatcgaactgggctttatgggcacgctcccgtggatcgcgacgatggtgacggcggcgtggggagcttacggcacgagcgccgcgtgctactatgccaaggcaaaggcggaaaatacggcgggcggcgtgacgtatgaaacggtgtgccgcgggcaggactgcgaggggtgagagagcatggagcttttgaaaaagagactggcgaatcttttgagcgtgaagagcatcgtgacgctgtgtttgacgatcacgttctgcgtgctgacggtgcaggcaaaggtgacgcaggagttcaacacggcgtatctcatggtgatcgcgttttatttcggcacgcagaacggcaaaaacgcgcgggaggaaacgtaaatgcgccacagcaggagcatcagcgacctgcgcgcggacgtggcggagaattgccggacgctgctcacgcttgctgagcgtgagggactgagcgttctggtgacggagacggtgcgcgacgcggcgtatcagcggatgctcgccgagaagggctacgcggccaaaggagcggtgacgccgtcgttccacgccgagcatgcaggattggcctttgacatttgcaaaaatgaggtggggcacgagtatgacgatcccgcgttttttgcgcggatgggggagatcggaaagcgagtcggattttcctggggaggagactgggggagctttcccgaccggccgcattttcagtgggatgcgggcggagtgtacacgagcgcgatgatccgcgcgaagcgctatccgccgcccatgccgcgctatgaggaggaagagatgacgcagcagcagtttgacgcgatgatggaaaactacctgaaaagactggcgcagcagacgccggcgtcctggagcgcggaggcgcgcgcctgggcggagaaaaacggcctgatcgcgggagacgaggcggggaacaaacagtaccgcagctttttgacgcgcgagcagatggccgtgctgatgcggcgctacgacgcgatgcagcgcggcaaatgacagaatggcaaatgaaagcgccggaggggagcccctccggtgcttttttgcgctaatgagctggaaacttgcaagaattcttgcaagatttggagattttggagaagaagacaaaaatgactacacggaaacgacaaaaagcgagaacaaaatttgttcagttttttttcactttccatgcgggttttcattgattttgcgaggaagttcctctataatttacactgaagcctgtatgagcatctttcagcggatttttgacggaatccatgcaagcagagagggctcttcggcgataaaaatgtttatcaaaatcagggagggttttatcttgaataaggtcatgtcactgcacgatgccgttgcaaagtacgtcgagaatggcgatactcttgcgatcggcggtttcaccaccaaccgtaagccgtatgccacggttagtgagatcctgcgtcagggtcagaaggacttcatcgtttatgccggccccggcggcggcgaagtcgatatgctcatcggcgagggccgcgtggctgcttacatcaactgctacaccgctaactccggctacaccaacgtttcccgccgcttccgcgctgccatcgagcagggcaagctcacgtatgaggactattctcaggacgtgctgatgctcatgctccacgcctcttctctcggccttccgttcctgccggtccgcctgatgcagggcagcggcctcatgaagttctggggcatcagcgaagaaaagcgcaagaccatgcccaagatcgaggatctcaagtgcgctgagatcgagaaccccatggttcccggccagaaggtcgtcgccgtgcccgttcccagaatcgacaccgcgatcatccacgtccagcaggcctctccggacggcacctgcatcatctgcggcgacgagttccacgatatcgacattgcgatcgctgcgcgcaagaccatcgtcacctgcgaggagatcgtctccgacgagttcatccgccgcgacccgaccaagacccgtatcttcggcgagtgcgtgcaggcggtcgtcaaggctccctatggcgcatggccctctcagtgctatgcctactatgatgacgacgatgccggcctgaaggaatacgacaaggcctccaagtatcaggatgccgaggatgccgtcaagcagctcgaaaaggctgcggccaaggctgccaaggcgctggagaaggctcccgaggacgagaagctcaagctcgccgccgaaaacgcccagaaggccttcgagctcgccaagagcggcgagaagatccccgagaccttcaaggatttccttgaaaagtgggtctacagctgcgaagatcagtccgctctgctcgataagctcggcggcagccgtctgatgcgcctgaagaacgagccgcacctcggctattccactacacattaaggtttgggaggctaaatagaaatgtctgattatacgaagtacacaaaacaggaaatgcaggcttatgccattgctaagaatattaaggaaaaccagatcgtcatcgtcggtacgggtcttccgctgatcggtgcgtcccttgccaagcgcgcggtctgccccagctgccatcccatcgtcgagtcgggcctgatggactgcgaccccgttgaggttccccgctccgtcggcgataaccgcttcatggcgcactgcgccgtgcagtggcccaacatccgcttcgtcggcttcgaggccaacgagtggctgcacgacgaggatcgtctcgttgccttcatcggcggcgcgcagatcgacccgtacggcaacgtgaactccacctgcattttcggcaagggcgactacctgcagcccaccacccgcttcaccggttccggcggcgccaacggcattgccacctactgcaacaccatcatcatgatgcagcaccagaagcgccgcttcatggaccatgtcgactacatcacctcctgcggctggatggacggccccggaggccgtgagcgcgcgggcctgcccggcaaccgcggtcctcagatggtcgttaccgacctcggcatcatgaagtttgatgaagagaccaagcgcatgtacctcgcttactactatccgttctcctctcccgagatggttcaggagaacaccggcttcgagatcgacgtctcccgcgccgagctgatggaaggcccctctccggagatcatccgcctcatccgtgaggagatcgacccgggtcaggcattcatcaaggttcccaaggataagtaatttgttatttcgatttaagaaggagaacttaatatgagcgaatattccatgccctcttatttccagagcatgccggtcatcggcaaggatctgagcgcattccacgaggacaacgccgctgagatccaggcggtggagcaggagatccatgagatccgcgaggctgctctcgaagccggtaagagcaccgaggcgctcaacgagtccggccagtggacggcgatgcagcgcatcatggagctcgttgacgaaggcacctggtgccccctcaacagcctctacaacccccaggacaacaagaacggcagcgtcggcatcgtcaagggtctcggccgtatcgacggcaagtgggccgtcatcatcgcgagcgacaacaagaagctcgcgggcgcctgggtccccggccaggctgacagcctgctgcgcggcagcgacacggccaagcgcctgcgcatccctctcgtttacgtgctgaactgctccggcgttaagctcgacgagcaggagaaggtgtaccccaaccgccgcggcggcggtacgccgttctatcgcaacagcgagctcaaccagatgggcgtgcccgtcatcgtcggcatctacggtacgaaccccgccggcggcggctatcactccatctccccgactatcctgatcgcgcatcaggacgccaacatggcagtcggcggcgccggtatcgtcggcggtatgagccccaagggccatgtcgacaaggaggctgctgaggcgctcatcaaggcgcagaagaacctcaagagcgacatccccggcaccgtcgccatccactatggcgagaccggcttcttccgcgaggtctacgccgatgaagagggcgtgctcgccggtatccgcaagtacatcgacatgctgcccgcttacgatcccgagttcttccgcgtcgacgatcccaaggagcccctgttcgacgccaacgacctctacagcatcgttccgttcaaccagaagcgctcttacgacatggtcgaagttctcgcgcgtcttttcgacggctccgagttcatggagtacaagcacggctacggccccgagatgatcaccggtcttgccaagatcgacggtctgctcgtcggcgttgtcgccaactatcagggcatgctgatgaactaccccgagtacaagatggcgacctacggccaggcgatgggcgtgggcggcaagctgtaccgtcagggcctcatcaagatgaacgaatttgtcaccctctgcgcgcgtgaccgcatcccgatgctgtgggtccaggataccaccggtatcgacgtcggcaacgacgctgagcgcgctgagctcctcggcctcggccagagcctcatctactccatccagtccagcaagctgccgatgatggagatcacgctccgcaagggcaccgccgcggcgcactacgtcctcggcggcccgcagggcaacgacaacaacgccttctccatcggcaccgctaccaccgagatctacgtcatgcacggcgagaccgctgcggccgccatgtatgcccgccgtctcgtgaaggaagagaaggccggcgaggatctgcagcccaccatcgacaagatgaacgcgctgatccaggactacgccaagaagtccagcccgaagttctgcgccaaggcaggcctgaccgacgagatcgtcgatatgaacgacatccgtccctacatccaggccttcgccaacgcctgctaccagaaccccgagagcatctgcccggtccatcagatgcttctgccgcgcgtcatccgcgactacgacgccctgaacgcgcagtaaaatatcacaacaatgcttttctcggcgctgcgcggaggcaagaaccgcgcagcgcacgggaaggcaaacggagagtacaatgagcatttataccatgggtatcgacgtcggctccaccgcgtcgaaatgtgtgatcttaaaggacggcagcgagatcgttgccaagtccctcgtcgctgtcggcacgggcacgtcgggtccatcccgcgcgatcgctcaggtgttggaaaacgcgggcatgacgcgcgagcagatggacttcgtccttgccacgggctacgggcgcaacagccttgacggccttgccgacatgcagatgagcgagctttcctgccacgccaagggcgcggcgttcctgttcccgaacgtgcgcacggtcgtcgatatcggcgggcaggacgtgaaggtcatcgagatcgagaacggcatgatgaaaaatttcgtcatgaacgacaagtgcgcagccggtaccggccgcttcctcgatgtcatggcccgcgtacttgaggtgaaggtcgaagaactgggcgaccttggcgacaagtcgaccaaggaggtcggtatcagctcgacttgcacggtctttgccgagagcgaggtcatctcgcagctcgccatgggcacggacaagtgcgacatcatccacggcatccacaagtccgtcgcaggccgcgtttccggcctctgccaccgcatcggtgtgcgcgacgacgtggtgatgaccggcggtgtcgcacagaaccacggcatcgtgaaagccctgcaggagcagcttggccacgagatccacaccacgcccctcacgcagtataacggtgcgctcggcgccgctctgtttgcctaccagaaggctttgaagaacaaataatccccatcattcgttatcaaatttttctatatcgcattaggaggaatcaatcatggctaaacaagtcagtcccggcgtgcttgctctgcgcaaggtcgtcgatgacgtctatgccgacgcccgtgaagcgaagaagcagggtaagctggtcggttggtccagctccaagttcccctgtgagcttgctgaggcctttgacctcaacgtgatgtatcccgagaaccaggctgccggtattgccgcccagcgcgacggtgagatcatgtgccaggctgccgaggatctcggcttcgacaacgatatctgcggttacgcacgtatctccctggcttacgccgccggtaagcgcgcaagccgcaagttcgaccccgaaacgctcgagttcatcatcgaccccaacagcggcaagcccctcaaggacgaaaacggcaaggtcgtcatcgatcctgagaccggcaagcccaagaaggaccccaagacgcaggtcccctacacggttctggacgatatccacgagatcgaggctctgcccgagaccaccgagaaggagatcgcctacaagaacttccgccgcgaggccatcaagccctacaagcagatgcgcatcccccagccggactttgtcctgtgctgcaacaacatctgcaactgcatgaccaagtggtacgagaatatcgcccgtatgtgcaacatccccctcatcatggtcgatatcccctacaacaacaccgtggaagtcagcgattccgctgtcaagtacgtccgcgcccagttcgacaacgccatccatgagctcgaaaagctcaccggcaagaagttcgacgagaagaagttcgagcttgcctgcaagcacgcgaaccgcaccgcgcagaactggctgaaggtctgcgacttcctgcagtacaagcccgccccgatgagcggcttcgacctctttaaccacatggccgacgtcgtcaccgcccgcggcaaggaagctgctgccgacgccttcgagctgctctccaaggacctgcagaagaacatcgaggaaggcacctccacgctgcccttccccgagcagtaccgcgtcatgttcgagggcatcccctgctggccgaagctcccgaacctgttcaagcccctcaaggagaatggcatcaacgtcaccgcagtcgtgtacgcgcccgcgttcggctttgtttacaacaacatggacgaaatggcccgcgcttactacaaggctccgaactccgtctgcatcgagcagggcgttgcctggcgtgaaggcatctgccgcgacaataaggtcgacggcgtgctcgtccactacaaccgctcctgcaagccctggtccggttatatggctgaaatgcagcgccgcttcaccgccgaccttggcgtgccctgcgccggtttcgacggcgaccaggctgacccgcgcaacttcaacgaagcgcagtacacgacccgtgtacagggtttggtcgaggctatggaagccaacaagaaagactaaggaggcgtgcaaaaatgagtatcgaagctatcgttaatgaattttccgctgttgccgccaatcccaagggccagctcaaggcctataaggacgcaggcaaaaagtgcatcggcgtgatgccttattacgcccccgaagagctggtttacgccgccggtatgatgccgttcggcatgtggggcagcaacaacaagaccgagcagcgctccaaggaatactgcgcgaccttctattgcaccatcgcccagctcgacctcgagatgctgctcgacggcacgatggatctgctggacggtgtcattaccccgaccatctgcgacacgctgcgccccatgagccagaacatccgcgtcgccatgagtgagaagctgccgtgcatcttcctcgcccatcctcagaaccgctttgccgactggggcaagcagttctgcctggatcagtacaacaacgtcaaggccggtcttgaaaagatcgctggtcacgagatcaagagcgaggacatcgccgcggccatcaaggtctacaacaagtcccgcgctgcccgccgtgagttcgtcaagctcgcaagcgaccactgcgacgtcgtcgacccgatcatgcgctcggccgtcttaaaggctgcctggttcatggataaggccgagtacaccgagaagctcaaggccctcaacgccgagctcaaggcgctgcccgctgccaagtggaacggcgtgaaggtcgttacctccggcatcatctgcgacaacccgacgctgctcaagatcttcaaggacaacaacgtcgccatcgcggcggacgatgtcgcccacgagtcccgtgccttccgcaccgacgcaagcgaagagggcgacccgatgatggcgctcgtcgatcagttcaccaacatcgactacgacgtcctgctctacgatccgcagtccaaccagaaccgccgcggcgagttcgtggccaacatggtcacggagtccggcgcacagggcttggtgctgttcatgcagcagttctgcgaccccgaggagatggagttcccgtacctcaagaaggcgctcgacgccgctgggatccccttcatcaagctcggcatcgaccagcagatgcgcgacttcggccaggcggcgaccgccatccaggcgtttgccgacgtgctctccgtgcagtaaggaaagtctcttttccctcctgccgtgcaaggcaggagggaaaagccgttaaaaacgcgcaaaaagtgcatacgcgcttgcaaattgagcaatcactttgctataatccaaattgaaaggtaaaaggaagaaatggaatacagcagcctgttcgttaccctgatgggtattggcacggtgttcttcggcctgatctgcatcattttcctcaccatggcaatgggtgcgatcctcaagggcaaagagaaagcaccggccgccgctgccgccgctcctgctgccgcccccgcaccggctcccaagccgcagggcatgcagcctgagatcgtggccgcgatcactgccgctctctcggaagaggtcggtatctcgtcccgcagcatgaacatcgtcaacattaaaaaaatctaattttatttttaggagagaacaaacatgatcaagcagtacaatgtcaccgttaacggtaccacctacgaagtcaccgtcgagtccgccgccggcggcagccgcatggcttccgctcccgtctcccgcgctgccgcggctcccgttgcccgcgctgccgctccggctcccgctgctgctccggctcctgccgccgctcccgctgctgcccccaaggctgctgctcccgccggtgccggcactgtcaccagcccgatgcccggcaccatcctcgatgtgaaggtcgccgccggtcaggccgtcaaggaaggcgatctgctgttcatcctcgaggccatgaagatggagaacgagatcttcgctccctgcgctggcaccatctcctccgtcgcagttgccaagggcgctgctgtcaaccccggcgacgttctgtgcgtcatcggctaaataacagcatcttccccctggattaactgtgaaaggaaaagaaatataaatgactgctattatcaatttcctgcagcagaccggcttctatatgtttggtcaggagggcaactggaaatgcctcattatgatcgccatttcctttgtcctgctgtatctggccatcgtgaagggctttgagccgctgctgctcctgcccatcgcgttcggtatgctgtgcaccaaccttcccggtgcggacatgttccacgagatcctgttcgccggaggacacgtccattgggatctcttcggaggagcgcccatcacgcaggaattcctgacagagatgtcggaagccggcgtagccgatgcggtgcttgccccgtgggcggtcggcagcaccgttagcctcggtctgctcgacgttctgtacctcggcgtcaagctcggcatctacccctgcctgatcttcatgggcgtcggcacgatgaccgacttcggccccctgatcgcgaaccccaagtccctgctgctcggcgctgccgctcagctcggtatcttcatgacttatgtcggcacccagttcatgggcttcacttaccagcagtccgcctccatcggtatcatcggcggcgctgacggcccgaccgcgatcttcgtcacctcccgtctcgctcccgagctgctcggtcctatcgccgttgccgcttattcctacatggccctcgtcccggtcatccagccccccatcatgaaggctctgaccaccaaggaagagcgccgcatcgtgatgcgcccgctgcgtcaggtcagcaagcgcgagaagatcatcttccccatcatgatcaccgtgttcgtggcgctgctcgttccttctgccgcgcctctgatcgcgtgcctgatgctcggtaacctgttcaaggagtccggcgttgtggagcgtctgcagaagaccgccggtaacgagctgatgaacatcgtcaccatcttcctcggctttaccgtcggtgctaccgccaccgccaccactttcctttccgttcagacccttgagatcatggcaatgggtatcgtcgcgttcggtttcggcaccgcgggcggcgtgctgctggccaagctcatgaacctgttcctgaaggaaaagatcaacccgctgatcggttccgccggcgtttccgccgttcctatggccgcccgtgtttctcaggtcgtcggccagaaggagaacccctccaacttcctgctcatgcacgccatgggcccgaacgttgcaggtgttatcggttccgctatcgccgcaggcgtcctgatgtccctgttcggctaattctcagcgatttgaaaaagagcacccgtaagggtgctctttttttgcgcccgcaggggcgcaggtgctttccgcgcgccgcgcggagggaaggatagcccgaaagggctgcaccttttcccgcgtaagcgcgggagggagagcggcgtgcgcgccgcgacaccaaagggggatattctctcacgtgagagaatatcccccttggacccccaagagaacgcaaggggccttgccccttgaccccgccattgcaagcgagcagctcgaagaactgcaatgcttgccgaatcaggtgcctgccttgttttatatctaaacgatttgacttacttctatcttcgctgtcgctttgcctgcgattcattacccttacataactgcgttctacttcggattctatcaatcctggtattgcctgccgaagcggcatagcttcgctcgccgcagtacgcattatcgaaacggtatgcattgttggcagcaggagattagtctgtacctctacaagatggacagagcggcacccgcaaggggtgtgccgcatccgtaaggcagcagagttgccaacggctgcgcaacagcggatagtaggagcagaggcaaatcgtatagtagctctaaacgcggcatcgccgcgcgcaggcatttccattccggagggaaaaaggtcattcgagattgagactgccaatctaaaacctttctcttgggggattgaaagggggctattctctttcacaaaagagaatagccccctttgattcgtgccgcgctcggtgagcgcgactatttacatcgagatccagccgaacgcgctggcgatcgagctgatcaaaatgatcgccgcgaagaacgggcacaggaagcggatcatggcgttgaagacctttcttctgcggaagggcgcgccgttcagcgtgacctcgtccgcgatgcggtcgacgccgatgacgcgggagacgaggatgcagcttgcgatggccgcgatgggcatcatcacggagttggtcaggaaatcgaagaagtccaaaaactgcatgccgatcacggtgacatttgccagcgggccatagcccaggctggagaggcttccgaggagaaccatagagacgcccatgatgctcgtggcctttctgcggctccagtgcagctcatcctgcaaggtagagacggcactttccgtcagcgcgatggagctcgtcagcgcggcgaacagcactagcaggaagaacgcgatgccgatcaccgtgccgaagcccatggaatcgaagaccttcgggatggtgatgaacatcagcgaggggccggccttcagcgcgccgggatcgccgccggagaaggcgaacaccgcggggatgatcatcaggcccgccatgatggcgatggccgtgtcgaagacctcgacattgcgggtggagctttcgatcgggacgtcctttttcatgtaggaaccgaacgtgatgagaatgcccatggcgatggacagggaataaaacatctgccccatggcggagacgaccgtcatccaggagaagttgtcaagattgggcacaaggaagtacttgacgccctccagcgcaccggggcgggtcacggaatacacggcgatgatcagcgacagcaccacgagaatgggcatcatgatcttggagacgcgctcaatgccgttttccacgcccgcgaagatgatcgccagcgtcatggccgtgaagacgaggaagcaaagctccgaggacacgccgttggagatgaaggacgagaaatagccgtcctccgcgacgaggtgcgccttgcccatcaggtattccgccagatatttgatgacccagccgccgatgacggagtagtaggggacgatcagaatcggaatgatggcgttgatccagccgcccacgcgcagcgcaggcttatcgctgaaggacttgtaagcgccgacagggctcttgccggtcatgcggccgatcgaagtctccgcaatgatcatcgtgtagccgaaggtcatcgccagaatgatgtataccagcaggaaaatagcgccgccgtatttggcggccagataaggaaagcgccagatgtttccgaggccgacggacgcgcccgcagccgaaaggacaaagccaatcttgccggaaaaggaacctcttttatgatccatgaagaatctcctctcttttttacgacatacaatttacttagtatatcatagaataaagatgaaaacaatctgaaatccgaagaaaagagagctatttgtcgttgccgtgcagaaaaataaaaaaggaagactcgaaagagtcttcctttttccatatttaagaccagagcagctgcattgcgacgatcagcgccgcagcggcgaggatatacacacctgcgatcagaagtcccgccttgagcgcgccgcggatggcggcattgcgctcctcgcgcgtcagctcaccggcagcgctttcccacgggcggtcgttcgcacggggcgcgtcgggcgcggaaaagtcgctgcgcttgcggtgaaagtgtgggagaaaggtcggctggcgttcgatgccgctcatgtcggcgatcgtgcggccgtcgtcctcctcgtagaagtcgtccttcttcatcacttatcgtacaggtggcagcacacgaagtggcccggctcgatctcgcgctggacgggtgcttcctccttgcagcaggccatgcagttggcgcagcgggtgtggaatttgcagcccttgggcggattggcaggggaggggatggagccctcgagcacgatgcggttcatcttcaccttcgggtcgggaatggggatggcggagaagagcgccttcgtgtaggggtggagcgggttgcggaagatatcttccttcgcgccgtactccacgaggttgccgaggtacatgacgccgacggtgtcggagatgtgctcgacaacggaaaggtcgtggctgatgaagaggtacgtcagcttgtatttatcctgcaattcgttcagcaggttgatgatctgcgcctggatggacacgtcgagtgcggagaccggctcgtcgcagacgatgaactcggggttgagcgcgagcgcacgcgcgatgcagatacgctggcgctggccgccggagaactcgtgcgggtagcggtccttgtggaacggctgtaagccgcagttgtccatgacctggtcgatataatcgtcgaattccgccttcgggacaaggttatgctcgcgcacggcctcgccgatgatctcgccgaccggcatacgcggggagagcgaggagaacgggtcctggaagatgatctgcatcttcgtgcgcagggcgcgcagctccttgtgggagaggtcatagacctcctgaccgttgaagagcacctgaccgccggacttggagtcatacaggcgcaggatcgtgcggcccgtggtcgtcttgccgcagccggattcgccgacaaggcccatcgtcgtgccgcgctttaaattgaacgtgacgccgtcgacggccttgacatagccgaccgtcttcgacaccataccgcccttgatcgggaagtatttcttgaggtgattgacctgcagaatgtactgcgggtcatattccacgggggtgaaattgttgtcgatgatgagtgaggacttctgcgcctcatcggcgtgctcctgcttcttgacaaattcatcggcattctgcttctgcgtttccttcagttcatcgaggacctgatcgtcgttcttaccggctttccaaaacggcatcttattcaccctcctttccgttttccttgccctcggccagttcttcctccacgacctcctcaaggtcggggcgcttgccgtcgtaatagcggtagcagctcaccttgtgcgtcggcgagatgctgacctcgtgcgggtagtcgccctcgcagccgttcacgcacatttcgcagcggtccttgaaatagcagtagttcggcatgttgatggggttcggcaccttgccggggatggagtagagcttgtcgacctgacggcccacgaccggcttggaggccatgaggccgatggtgtaggggtgcgcgggatgggcgaagatctcctccgccgtgccttctcgacgatgcggccggcgtacatgacgaccacatagtccgccatttcggcgatgacgccgaggtcgtgcgtgatgaacatgatcgaggaattgatctgatccttcaggttgcgcagaaggtcaaggatctgcgcctggatcgtcacgtcgagcgccgtggtgggctcgtcggcgatgatgagctttgggctgcacgcaagcgccatggcgatcatcacgcgctggcgcataccgccggagagctcgtgcgggaacatcttgtaaacgccctcgctgttggcaatgccgaccatttcaaggagctcaatggtgcgcgccttgatctgcgcttcgtcgtggcccttttcgttgtgcagggccagcacctcgtcgacctggtcgccgatgcggaacacggggttcagcgcggtcatcggctcctggaagatcatggagatgtagttgccgcgtaagtgctgcatgacgctgtcaggcgccttcgtgacgtcgtaggccttgctgccgaggttcaggcgaatttcgccctccacgacctgaccctgcgggcgctgcaaaagctgcatgagcgacaaactcgtgaccgatttgccgcagccggactcgccgacgacgccgacagtcttgccgatgggcacggagaacgtgacgccgtcgaccgacttgacaacgcccgtgtcggtgaaaaagtaggtgtgcaggttgtcgaattcgaccgcgttgttggggtcgtgcatctcggtcagatactcggattcgggaacgttcttgcgcttgcgcttcttttcgagcgcatttgtgatcttgcggttttctttggaaatgcggcgggattcctttgcggaaagatagccgtcattatgcttcttagccattcaaattccctcctttctcagcgcttcatcttcgggtcgaacgcgtcgcgcagaccgtcgccgacgaagttgaagccgaggaccgtcagcatcaggcagatgccggcagggatccagatgaaccagtagctcgtgaggacgtaagagttggaaacgtcgttcatgatgttgccccaggaggcgaacgggaacttgacgccgaggccgaggaagctgagcgttgcctcagtgatgatggtggagccgaggctcatcgtgcagttgacgatgagctgcgggatgacgttggggatcaggtggcggaagatgcggcgcgaaacgctgatgccgcaggcctccgtcgcggtcatgaactcctgctcgcgcagagagaggatctggccgcggacgagacgggcgatacccggccagccgaggaagcccaagatcaacattaagtagagcattcggatctgcgggtcgacgcgcatgccgtccatcgctgcgcccagaatgatgatgagcggggtggaggggatgcagtagaagatatcgacgatacgcatgatgaggttatcgacccagccgccgaaatagccggagacgccgccgagcaccacgccgagcgccgcggagatgatgacgacgatgaagccgatcatcagcgacacgcggccgccgtacatcaggcgggtgagcatatccataccgtttttatccgtaccgagccagtgcgcggagtcggggaaggaataggcgtcgaacacgcgggtggacgtgccctccttgatcgaccactggtacttggcgggattgtattcaagcttgatctcgcgctcctgaccggcgtcgttcacataggtgtactcggtctcaccgttttcgacggcctgctgcacgcgctctttgaagtccttgctgatgaccgtgccgctgaccttggactggatgacaaagcggctgatgtaggcgatctcctcgccattcagcatgacgctgtcttcatcaagcgtataggttttgccgtcggccgtaaactccgcttcgccgttggcgtgcgccttgagggcgctgaagctgaagttgaagccgaacttctggctggggtcgttcgagctgatgatgtccttataggcgatggcaaggagtctgccgccgctcgagacggagtagagcgagtcgccctcctcggtcacgtcgtaggtgacgcccttgtaggagaagctgtcgtccttgcccatgtgcagcgtgagctgcgcctggaggatcgtgccgaactcctggccgtcggccacgagatagcggtactcggtgttctcgctcatggcggcgtattccttgagctggatatcgtcgcggtagaagacctcgtcctgcccgtaggggctgatgaggccgccgatgaaggagaaaatgaacatcacggcgaggatcgtcagacctacgaccgcgaggcggttgcggaaaaagcgcttggcgaccagcgtgcccggggaaaggaccttgacgcggcggtcgtcgttgagggaaagctgctcgggggagccgctctcctgctgatcgttgatcttcttttcttcagacatggattagcgcctcctttcttacgcgatgcgcacgcgggggtcgaccaccgcgtacaggatgtcggagatcaggttgcccagcagggtcaggatcgccaggaacgtcatgtagaacatggagaaggggatatcgcccgcgaccatcgcattgtacgagatgaagccgatgccggggatggcgaacagcgtctctgtgatgagcgcgccggcaaaaaggccgggcagcgagccgccgatgaacgtcacgagcgggatgagcgtgttgcggaaggcatggtgatagatgaccttatgctcggaaagacccttggcgcgggcggtgcggatgtagtcggcgttgagcacctcgagcatgttcgtgcgcacatagcgcatccacgggccgatggaaatgaacaccagcgtcacgatgggcagcaccagatgctttgccatatcgaggatctgaccaaactggctgagggagttgaagtcacgtcccgtgaggccgacaaggtcgaaccagcggagcttgatgcagaagatgagctttaagagcgtcgcaaagaagaacgtcggcagcgacatacccagcagagcgaccgtcgtgacggtgtagtcggtcacgctgtactgcttggtggcggccacgatgccgagcggcaccgcgatgagaagctcgaacacgagcgagatggcgcccatgatgaacgagacccagatgacctcgttgaacttctggatgacgggcacggtatacttccagctgtcgccgaagttgccggtgcacaggttcttgagctggacgaaaaagccggggatgaggcccaggtccagaccgtattgtgcgttgagctgtgccagccactcctcatagggcttggagccgggagcctgcgagagctgccgcgccatattctccacgtaggagctgggcatgcagcgcataagcaggtagatgatgaatgtcacaaaaaagaggatcaccaccgacagcagcaggcgttttaccagatatttgcgcatagaatccctccgttttttgataacggccgccccgcgcccggggtcttgtcgccgtttcgggtttgatatgtctctctctgcatatcagccaaatgctccgatgcaccggggcatttggatcataggcagatgtgcctggggcaggctaccccgcggcagaagccgcagggtagccatgcgcctaagtaacgtttttgtgcagcgacggagcttactgcaggtcgagcagctcgatgtcgttgtaccaggtccagtaggtggtgatatcaggcgtcacggtgtcgaggttgacacgcttggcggagaagatcacgcagttctggcgctgatagatggggatctcgaccgcccagtcggccacgatgtcaaggcactgcttatacagggtcttgcggtaggtctggtcggtggactgacgagccatcatgatgagctcatcgaggtcggcatccttgatccagtaggacttctcgttggagccgcccttgctgtgatagatctggaacatatccgggtcgggcgtggcctgccatgccatggcgaacatgtcggcagtaccggcgttgatcgcgttggtcatctcggcgaagttggacatatcggagacgatcaggttgaagccgatctccttgagagcgtcggacgcgagggtcagagccatgaaggaggggtggtcgcccttgccgctgccgccaaccatgacttcagcgtccatgcggccgccggcgggagcagcggtgatcttgccgtcagcgacggtgtagccggcagcctcgaagtagccgagagcggcctgcttggcggcggcgtacttgtcgtcggcgctcatgccttcggtgtagatgtcgttgccgttgacgtcaacggagaaggcgaccttgtagccctcatcggtaacgcgcggagcggcccaggaggtgtcggagatggggtagttgatgacgttggcgaactcaccgtagtaggagtcgacagcgacatcgcggtaaacggcgataaccgtggcgatggccttacgcagatccttggaggcctcatcaccgccgttgccgtcgccgaccttcacgcggttggcgttgaagccgacatagccgtagccgaggttggcaacgaggtcggtctggatggtatcgccggagatctcgccgttagagttggcttccttgatctgctcggcagcttccttggagtaggaggggtcggtcacgtcgatcgtgccggagacaacgccggggatcttgtcttcatccgtcatctcgcgccagatgacggtgtcgatcttgggctcgcccttccagtaggtcgggttcttctgcagggtgacagcgccgttggaccagctctcgaaggtgtacgggccggagccgacaggcgtggaggtcacggacttgacgtgggacagatcgcccttgacaaagccgaacatgttgttgtcgtagtcatacttgtcagtctcaccatagtagtgcatggggcacacggtgacggggagctgatagatggcggtggcgttgacctcggtgagggtgacggtcatggagtagtcaccggtcttgacgataccggcaacgttgggagcggactcgccggtctggacggcgacggtatagtcggtgtaggcgtcgcccagctcggcctcgaggaaggcggagatgctggtgccggcggtctcggcattgatgccgtcatcggagatgtcgtagccgtacttagcaacgatggcagcccagaagtcttcgacggtcgcgtcatcggcgagctcgaagccccagttgccagcctgcgcggcgacggagtcgtcagcggtggcgtaaccggcggcgaccacgtagtcaaggatctcctgggcgaacttcacgccggcggcgttgaaggcggtccagtaagcgttgtactgctcttcggtgtagaagtcgttggcggcgtaggcgtcaggaccggcggcgaggatcaggttctgcacagtgtccataccgctgcgataggcctccagacccttgatgggcagggagtacagcgtggaaacgccgtcataagcggggtcaagcaggacatagtaagagaagatgacatcgtcgatggtcatttcctcaccgtcggagaacttgacgccctctttcagcgtgatgttgtagtcgaccgtgccgtcgctgttttcaacgatgtcgcagtcggcaatgcccttgtaagtatagtcggtgccgttgtagggacggacgtcgccctcgatgcccttgaggacgacagagccctcgcggtcgacgagaaacagaccgtcgaagaccatacccatgacctggttttcatagtcattggtatagaagaagggggagaacttaccgtcgaagttctgcgtgccgacaacaagcgtcttgccgtcggtctggccgtcgtccgtcttcttgtcgccgcagccggccagaagaccaagacacatgaccagagaaaggatcagtgcaagtgttcttttcattgaatctactcctttataaatttttgccaaacgggtcgccccgtgcagcacaaagtaaggtgcccgcgcgtgtacacgcgcggaaagggggagtgcgcctcctatggacatctgtgcgccgaaaaacagcgcgtagaatttttttgattatagcatgaaaggatgcaaattgtacagagtaaaatcttaggaattatcttttttaggcaatttgtcccattctgcctgcataatttcggcgcgcagaacaagggcgctcagtagggctgtcagcttcagcagtacatagagcagcgcgaaaaacgtctgtcctgcgtggtcattgacgaaaaagaagatcaattcgcacacgatgccgagaagagaaaagaccgctgtgaccgccgttcgcacgggcagaacggccacgctttttttgtagttgtactcgcgcaccgtgccccaatccatgccgagctttgcaagcgcccagatgacgctcgccgcgcccagaaactcgccgaggtaggggagcagaacgtaaaaacagttctgcatccccggcgcgggaatgcacccgcccgcgaggaccgcggcgatcaaaatggccgccattccccacacggcgcgcttgattctgcgctgctttgcatcatcgctttggcaggcgtagagcgccccgtcgtaaacatattcgcccgcgacgttcagatgaaagtcgttcaggtgctcgcggcggttgtgctttttgtgctgtttgcccatcattcgatgtccgtgaggtcaaagtccgcgagcgccttttccgcttcggcgcacacgccgcgaaggcacgcttcgtcaaacggactctcaaggtcggcgtttttgagaaggtcggtgaacgtccggctgccgccctgcacggtgtaggccatgtagtgctgccaggcattcttgacgtccttgcggatcatcgcccagaattcgagcgccacggtctgggcaaggcagtagtcaatgtagtagaaggggctcgaataaatgtggtgctggcgctgccagcccatgccctcggagtagaacgggatctcgccgtcaagcttcatccacggcatgtagacgccgagcagctccttccaaacggcgtggcgctcggcgggcgtcatctcgggcttttcatacacgatgtgctggaagtggtcgaccatcgtgccgtaggggatgaacgtcagtgcgccggagaggtggctgtagaggaactttttcgcgtcggggccaaaaaagccgtctgcccacggctcggcgaagaattccatagacatcgagtggacctcgcaggcctccatgctcggccagatgtagtcgatggggatgcgcttgcggttcgtccaggcttcgaaggcgtgaccggcctcgtgcgtcacgacctccacgtcgtgctgcgtgccgttgaagttggcgaagatgaagggaacctcatagtccatgatgctcgtgcagtagccgcccgcctgcttgccctcggtcgagagcacgtcgagcagctcgtcacgcagcatcgtttcgaagaactccttcgtctcgggcgagagctcgctgtagaacttcataccctgggcgagaatgtcgtccggcgtgcccgcagggcggggattgccggaacggaattcgagcgcgttgtcggcaaagctcatcggatactgcttgcccaggcgcttggcctgctcgcgatagaccttgtcggccacggggacgagatacttgacgaccgcctcgcggaacttctcgacatcgtccttcgtatagcagttgcggcccatgcggtagtagccgagcgtggtgtagccctcgtagccgagctttttgcccatcgcgtcgcggagttttacgagcttgtcgtagagctcgtcaaattttgcctgattgtccttgtaccactggccctcggccttccacgcggcaaggcgcttttcatcgtcagcgcaggtcttgaacggggagagctgcgagagcgtgtagaccttgccctcaaacgggatctgcgccgaggcgagcagcttttcatactcctgcgtcaggtcgttttcctgctgcaattcggggatgatagcgggggagaaggtcttgagcgcgatctcggcgttcaagaacatcagatcgccgtattccttttcaaagtccgcgcggaaggcactttcgagcatcgctgccgtccacgcctgattgtattcctcaagctcagggttgaagttgttccagaatttttcctcgccgtcgtagaatttgtctcgcgtgtcgatcgagtggcggatgctcgcaagcgtcgcggcggtggagatgtggctcatcagctcctgctgcgagagaaagactctgcgtgcttcttcgtagctcttggcgcttttgagctcttctgtcagcgcggaaaggcgctgcttgctcgcctcaggatcggggcggatgtaggtcatttcggaaaatttcatgttgtttcctccatcaaatttttattggacaaaagttggttattcctgccggttgtagatcgcagacacgtccttgcgtccgccgccgatgacgacgaccgctgcggccgccgtgacgagcataaagcccgtcagcacgccgcgcacggggagaaacgccaccagcgcgcccgcgagcagattgcccgtgaagctgccgacggtgttgagcatgttgaacgcgccgttgaagcggccctttttctcatccggcacgtagctctgcgtggcggagatgcggatggtgtagctcgtcacgccgaggatacccgttaaaaagcacgagaccatcatcaccggcagcgggcagtagagatagaagccctcacacagcgagatgacgacataaaccatcagggcaatggaatacttatgctgcacaggcagcttgattttataatgaatgccgccgccgatggcgcggccgaagatcgccatgccccagacgagcatatagatgtattcgccgttatcgaatgtcgacttgaagtacggcagcgtgatgacctgcgacgcgcccgaggccagcatgctgaatgtgaaatagatggccacgcgcagaagccccttttcactcatcagatagcgaaagccctctttgatgtcgcgcaggagctggcggcccgaggagtgctgctcttcgagcgcgagcgcggcacgctgcttttcgatgtagtgttcctcggcgcggatctgcgtctccgccgtcgcggcgatgaagaagcacagcgcgttgatgccgagcagcggcgcaatgccgaagagattataaaagtacgttgcgatcgggatgatgagcgccgagagcgtctccagcacgctcgcgatggagtaggccttggagtagttcccctcagagatcagcaggggatagaagctgtcgtaggcgacatagtagatgctgttgatcgagccgatgataaagcagaagaccgcgagcatcggaaagctgaaccagccgcggctcaggatcagtgcagcgacaaggtagaccccggaggaaagaaagtccagcgtgtagatcgtcttcttgcgggaaaagcggtcgaggatcgcgcccgagaagatcggcatgacgatctgcggcagcgtgaacgttgcaatgtagatggcgtagagcagattcgagcccgtgtagtccagcacgagcaggctcagtgcgaagccggacatcgaattgcccagcatcgagatcacgctgcccaatgtgatgatagtgaaatcccgcgtccacagcggtgagaccggagctggcgcgggagaagaggattcgttcatagaaatagcctccttccggcttaagagcgcaaacaaaagcccgctcgatgcgggaggggggacggaaatcaactgtattataaaggatttcgataaaagaatcaactataattccaccaaatatggacaaatgcacaaatgccgcccctgttttgtgcggcacagagggagtgtccgcttgccgagaagcatgacgtgtgctataataccgccaaacaaaaataaactgtggaggacatcaccatgcaacatgcaccggcaagagaactgctgcattttatcaaaaatagccccacctgctaccatgtgaccgagaacatccgccaaaagctcctcgcaaacggctataccgagctttccgaacgcgaacgctgggaggcagcccccggcgggaagtatttcgtccgccgcaacggctcgagcaccatcgccttccgcgtgccggagatgatcgacggcggcttcgccatggctgcggcgcactccgactcgccagcgttccgtttaaaagagcatcccgaccgccgcagcgcgcattatgtccagctctccaccgaaaaatacggcggcatgctgatgtcgacgtggttcgaccgcccactctccgtcgcgggccgcgtcttcgtgcgcgcaaacggcgagatcgtcgaaaaactcgtgagcgtcgaccgcgacctgctcgtcattcccaatgtcgccatccacatgaaccgcacggcgaacgacggcatgaagtacctcgcgaatatcgacacgctgccgctgctcggcggcaaagacagcggcggcatcctgcccatcgtcgccaaagccgcggacgttgcagaaaacgacatcctcggcagcgacctgttcctctactgccgcggcgaggggacgctgcttggtgagaacgaggagtacatcctttctcccaagctcgacgatctcgagtgcgcctgcggctgcctcgagggcttccttgcggcgaaggagagcggaaatatcgccgtctgctgcattttcgacaatgaagaggtcggctcgtccaccaagcagggtgcgggttcgacgttcctgcgcgacacgctgcgccgcatcgccctgtgcctcggaaaggacgagcaggagctccagatgatgctcgcgtgcagcttcctcgtctcggcggacaacgcgcacgcccagcaccccaaccacggtgaatacgccgaccccgacaactgcccgtatatgaacgagggcgtcgtcatcaagttcaacgccaaccagcgctacgcgaccgatggccgctcctgcgctattttccgcgccgtgtgcgaaaacgcgggcgttcccacgcaggtcatgtccaaccgctccgatcttcccggcggctcgacgctcggctcgatctccgacacgctcgtgccggtcagcacggtggacatcggccttccccagctcgcgatgcactcttcgtgggagaccgcgggcgtgcaggactatgaattcctgatccgcgcgatgacggagtatttcggcagcgcactgtaagagacctgccgaaacggtagacaaaagcgcggaaacatgctaaaataaaacgatttttgatcaaatacgctttcaacgacagaaaggaaatatatcatggacgttaaggaaattctcaagcatgttgaccataccctcctcaagcagactgccacctgggaggacatcaagcagatctgtgacgacggcatcaagtacggctgcgcgagcgtctgcattccgcagacctatgtgaatcacgccgcgcactacgtcgccgagcagcagcactatggcttcggccagctgcccatctgcacggtcatcggcttccccaacggctacacgcccagcggcatcaagtgcatggaggccgagtccgccgtcgccgacggcgcgaccgagatcgacatggtcatcaacctcggctgggtcaaggaaggccagtacgacaagatccttcaggagatcaactccgtcaagatctcctgccacggcaacatcttaaaggtcatcatcgagacctgcctgctcaccgacgaagagaagatcaagctctgcgaggtcgtctctgcctctcacgccgactatatcaagacctccacgggctttgctggcggcggcgcgacccgcgaggatgtcgctctcatggccgcccacatgaccaacggcaagaagatcaaggccgccggcggcattgcgagtctgcaggatgccgaagacttcctcaagctcggcgccgaccgcctcggcacgtcccgcatcgtcaaggccgtcaaggagctcgaggccaagggcgaactttaagaaaggggagggctcaatatgccgactccgcataacagcgcgaaaaagggcgacttcgccaagaccgttctgatgcccggcgacccgctgcgcgcgaagttcatcgccgaaacatttttagatgaaccaaagctcgtcaacaatgtccgcggcgtgcagggctacacgggtacctacaagggcgttcccgtcagcgtgatggccagcggcatggggatgccgtccatcggtatctactcctacgagctgttcacgcagtacgatgtcgagagcatcatccgcgtcggctcggcgggcgcgctgcaaaaggacttgaagctcggtgacgtggtcgcgggcatgggtgcgtgcacgaactcgaattacgccgcgcagtacggccttggcggcacgtttgcgcccattgcggactttcagctgctctccgccgctgtcgaatcggcaaaggagctcggcgtccgcatggacgtcggcaacctctactcgtccgacacgttctacgacgcgtcgaacccgtcgcttaagtgggcggacatgggcgtgctcgccatcgagatggaggccgccgccctctactgcaacgccgcctatacgaaaaagcgcggactttccctctgctcgatctccgacaatatcctcaccggcgaggagctttcgcccgaggcgcggcagacgagcttcaccgccatgatgaaaatcgcgctcgaaacagccgtaaagatggcggcagaatcccaaaagtaaggagattatcatgctatgcgcgtgatcgatattgaaaacattgtgaccaacatgaaggacgatacccgcttcgtcctgcgctgcgaggaggtctttcacgacaagatcagctccgccgcggcgagcattttaatgaacaagggacaaaagcccatcgtctgcctgacgggcccgagcggttcgggcaagacgacgacggcgatgcgcctgcgcgaatacctcgaaaacctcggcgtcaaggtctgcatgctcagcatggataactttttcctgccgattgatcagcgtccgcccgaggcgagcgactgggagtcgccctactgcgtgaaccgcgatttactcatcgaggatatccaccgcttgatggacggcgagctcgtggagctgccggtctacgacttcaaggccggcggcgtcggcggctacaagcccatgcagggcaacaaggacgccgtcatcatcgccgagggcatccacatgctcaacccgctgattttcgaccagctcagaagcgaagctacgggcgtttacgttgccccgcgtacgcgtatcatcacgcacaaggaccgcatcgttcgtcccgagcagctgcgcgtggcgcgccgcatgatccgcgactatcagggccgcggccattcgctgcgtcagaccgtcgagcgcgccgagagtgtcgaccgcggcgagctcaactacatcatgccgaacaagccgaacgcgagcatccacatcgacacgttccacgactacgagccgtgcatcctcgcgcggtatttgaaggagatccccgagttttacagccagctcgacgatcagtttatcgccgagcacgggctgagcgacctgatggacgttgtcaactccgtgccgtcgctgcgcacggactatgtcccgcgcgactccatcgtgcgagagttcgtcggcggcagctgctttgagtattaaatcggcaaaatccgacaacaaattgtaatttctgatttttacaatacaaaacgtaatcggaatttggcgcttttgcgcgaaaaggggagggagagcgaatgcattctgacgagcggcgaaaggccattgccgacgtgctgcgcgcggcggacgcgccgatcagcgcctccgcgctggcggaaaaattctccgtctcgcgccagatcatcgtgggcgatatcgcgctgctgcgctcctcgggcgaggaaatcctcgcgactccgcgcggctatgtgacgccgaaggaggcacgcggcatcctccgccgtgtcgccgtgaagcacacgccgcaggagatggaagccgagctcaacaccatcgtcgacaacggctgtacggtcatcgacgtcatcgtcgaccaccccatctacggccagctcaccggcccgctgcaaatttcgaaccgctacgaggtcagccagttcattgagcgctgcaaaaaggcggagccgctgtccagtcttaccgacggcatccacctgcacacgctctcctgtcccgacgaggcggcgttcgagcgcacgaagagtgcgctgcgcgcactgcgcgtcctgctggaggaaaacggaaattaagggttgacaatcctcacacaagcgattatagtgtcatgtgcaggtgtcaagacacctgcacatgacactattttatttttaggctgtgaggatatcatggaaaaattcaaagcgttctgcaaacgcaaaaacattgaagtctcggccaagcgctacggcatcgatgcgctcggcgcaatggcgcagggcctcttctgctcgctgctcatcggcacgatcatcaagacgctcggcgcgcagctgggcgttccgtttctgacggacatcggcacctatgcgatgtccgtctccggccctgcgatggctattgccatcggctacgcgctgcaggcgcccccgatggtgctcttctccctcgcggcggtgggctatgcggccaacgccgagggcggcgcaggcggcccactcgcggtgctcatcatcgcgatccttgccgccgagtgcggcaaggccgtgagcaaggagacgaagatcgacattttggtcacgcccgccgtgaccatcttggtcggcgtcgcgctcgccaagtggatcgccccgcccatcggcacggcggcctcggcatttggcattatcatcgacaatgcgaccaaactccagccgttctggatgggcatcgcggtctccgtgcttgtcggcgtcgcgctcacgctgccgatctcttccgccgccatctgctcggtgctgggcctgacgggccttgccggcggcgcggccgtcgcaggctgctgcgcgcagatggtcggcttcgccgtgatgagctttaaggaaaaccgctggggcggccttgtctctcagggcctcggcacgtcgatgctccagatgccgaacattgtcagaaatccccgcgtctggatcgcgccgacgcttgcctcggccatcaccggccctatcgcaacgtgcgtgttccatcttgagatgaacggtgcgccgatcaactccggtatgggcacctgcggcctgtgcggcctcatcggcgtgtggacgggctgggtctccccgagcgaggaggctgtcgccaagggcgcggcggccatgagcccaacgggctttgactggctgggtctcatcctcgttgccatcgtgctgcccgccatccttgctccgctcatcaatatggtctgccgccgcctcggctgggtcaaggacggcgacctgaagctcgactgagaaaataacgtgtaaaaagtgtggactttttgtaaagaatcccatcaattatcacaaaaaaagtaaaatgggggagaatcggacttgattctcccctttgcttttgctatactgtcaaacgaagtgcgtccgcacttcaaaataaaccggaaagcggcccgccgccgaccggaaaaataaggaaggatagaagaatgaagaagttttttgcgctgcttctcgctctcgtcatggttctgtccctcgttgcctgcggtgataagaagaccgacgacaatcagggcgacaccaacactgacgatcagcagggcgacaccaccacttacaccaatcctgacgatatcgacgacaacatgacgtccgaagacggcaagtatgagatcgcgttcgtcaccgacgtcggccagctgaaggataagtccttcaaccagggcaccttcgacggcgtgaagctctatgccgccaacaacggcctgagctacaaatactatcagcccgccaacggcgatcaggctactgatgacgaccgttacgacgccatgaaggctgccgtggacggcggcgccaaggtcatcgtctgcgccggcttcatgcagggcacggccctcgagaaggccgctaaggaattcaccgacaccaagttcgtcttcatcgacggttggtccctcggccttgacaacgttgcgggcatcgccttcaacgaagagcagtgcggctacttcgccggttacgctgtcgtcaaggaaggctatgagaagctcggcttcaccggcggcggcggcggcacgaaccccgcctgcatccgttacggctggggctttgctcagggcgccaacgacgctgctaaggaaatggataagaccgtcgacctgaactactcctgggagtacggcgcttccttccaggcttcccccgagctgcagaccatggtctccggctggtactccaacggcactgagatcgtcttcgcctgcggcggttccatgttccagtccgtcgccgctgccgcttccgctgaggacggcaaggtcgtcggcgtcgacgtcgaccagtccagcgagtccgagaccgtcgtcacctccgctatgaagggcctgagcgatgctgccgagtgggcgatcgccaaggtttacgatggcacctgggacgagatcggcaatgctgccacctccctgggcgttgctgagaatgctgtcggcctgccgaccgctacctggtccatggagaacttctccgttgccgactatgaagacctcttccagaaggtcctcaacggcgacatcaccatcgacaacaactctgagatggccaaccccgctgagggcggcctgaccaacgtcaacgtcaactacatcggcggctaattcccaatagcgcatacataaaagaacggaagacttcggtcttccgttctttttcacatttctgacagggaaagacatgcgaaaaccttttgcttttcatcggaaaacgtgatatagtataatgtaattatggtttccgtcctcgcagcgcagcgcgtgcgggccatcaaaacggaaggagggcgaaaaaacttggagaatcagtatgcgatcgaaatgctgaatatcacgaagaaattccccggtattatcgccaacgacaacatcaccttacagctcaaaaagggcgagatccacgccctgctcggtgaaaacggcgcgggaaaatcgaccttaatgtcggttctcttcggcctttatcagccggaggagggcatcatcaaaaaggacggcaaggtcgtgtccatcaaggacccgaacgacgccaccgcgctcggcatcggcatggtgcaccagcatttcaagctggtggacgttttcacggtgctcgacaacatcatcctcggcgcggagacgacgaagtgcggctttttgcagaagaaagaggcacgcaaaaaggtcgaggagatctcgaagcgctacggcctgaatgtcgaccttgacgccaaggtcgaggatatcacggtcggtatgcagcagcgcgtggaaattctgaagatgctgtatcgcgacaacgagatcctcatcttcgatgagccgaccgcggtgctcaccccgcaggagatcgaagagctgatggccacgatgaaggagtttgcccgcgaaggcaagtccatcctcttcatctcccacaagctcaatgagatcatggaggtttccgaccgcgtgagcgttctgcgcaagggtaagtacatcggcacggtcaatacgagcgagaccaccaagcaggagctttccaacatgatggtcggccgccccgtgcagctcgaggtcacgaaggacgaggccaagcccgcgggcgaggtcttgaaggtcgaccacctctgcgtccattcccacgtgcaaaagcgcaacgccgtgaacgacgtttccttcaccgtccgcgcgggcgagatcgtctgcatcgccggtatcgacggcaacggtcagacggagcttgtctacggcctgacgggccttgataagccgtcctccggcacgatcaccctctgcggcaaggatatctctcatgcctccatccgccaccgcggtgagcacatgagccacattcccgaagaccgccacaagcacggcctcgtgctcgacttcacactcgagcagaatatggtgctccagcgcttcaacgagccgcgctttgaaaaccacggctttatcaacaacaaggctgtgcgcgactatgccaactacctgatcgacaagttcgacgtgcgcagcggccagggcgcgattacgcgcgcgcgttccatgtccggcggcaaccagcagaaggccatcatcgcccgcgaggtcgaccgcgacaaggatctcatcgtcgccgtgcagcccacgcgcggccttgacgtcggcgcgatcgaattcatccacagccagctcgtcgccgagcgcgaccgcggcaaggcgattttgctcgtctcgctcgagctggacgaggtcatgagcctctctgaccgcatcctcgtcatgtacgagggtgagatcgtcggcgagctcgacccgaagaaaaccaccgtcgaagagctcggcctttacatggccggagccaagcgcatggcgaaggaggaggcggccgtatgaaaaaagaacacttcctgcaaagcgaaggcttcaagaccgtcgcggcgtccgtcctctcgatcctgatcggcctcgccgtcggcagcatcgtcattttgatcgtcggcctcacgagcccgaacctctcgctctcctcggcgtgggacggcatccgcatcgtgttcggcggcctgttctccacgggacgcgacgcctccggtacgctgatgtggggcttcaacccgacgaatatcggcaacatgctcttccgtgccgcgccgctcatcatgacgggcctttccgtcggcatggcgtataagaccggccttttcaacatcggcgcgccgggccagtacctcatcggtacgctcgtgtcactctccatcgccctcggtcttccgtccgagacgatgtccaccacgctcatctggctgctcgccttcctcggcggcacgctcgcgggcgcgatctggggcgcgatccccggccttttcaaggccctgctcaacatcaacgaggtgctcgcctgtatcatgacgaaccggatcgcggcaaacctcgtcacatggctctttgatatcagtaacttcaagaacgtcaccgagtccaccaagaccggctacatctacaagacgacctacaatggcgtcgccaccgcgaagatgggccttgacaagctcttcccgaactcccaggtcaacggcggcatcctcatcgccgtcatctttgccatcggcgtttacgtgatgatgtccaagacgacgttcggctatcagctcaaggcctgcggctccaaccgccacgctgcgcgctatgccggtatcgccgacaagcgtaacatcgtcatctccatggcgatcgcgggcggactgagcgcggcgggcgcttcgctctactatctctccggcaacacagagttcttctggtccacgtaccagtcgctccctgccatcggcttcaacggtatccccgttgcgatgcttgcctcctgtaaccccatcggcatcatcttcacggcgctgttcatgtcgatgctcgatatctcgggcctgcagctgacgaacctgacggcctataacgagtacatcacgaacgtcatcatcgccgtcatcgtgtatctgagcgccttctcgctggtcatcaagatgtggatcggcaagctcggcaaaaagaaggacgacggcgcggatgccaacgcggagcccgctccggcggcagttcccgcgccagccggtgcacaagcggaaacggagaaaggaggcgacgcgaaatgacattcctcattcagcagacgctcatttatgccgtccctctgatgatcgtggcgctcgcgggcgtgttcgccgagcgcagcggtatcatcaacctggcgctcgaaggtatcatggtcttcggcgcattcatcggcgtctggttcgtgcgcattctgcagacgagcgacgccatcctctccctcaagcagagcggcaactgggtcgcgcttcagggcgtggagcttctcacgatgctggtcgcggcggccttcggcgcgctgttctcgctgcttctgagctttgcctccatcaacctgcgtgccgaccagaccatcggcggcacggcgctgaacctgatggcccccgcgctggtgctgttcttcatccgcatcatcgccaaccagaatacgctgcagatgctcacgggcgacgcggcgagctggttcatgatcaaaaagtctacgctcggcatcgacaagaacaccgacctcggctttttcggcgagacgttcgtcaacaaggtctatcttgcgacctacgtctgcatcctgcttttcatcatcctgtcgatcctgctctataagacgcgcttcggcctgcgcctgcgcgcctgcggcgaaaatccccaggcggcggattcgctgggcatcaacgtctacaagatgcgctacgcgggcacgaccatttccggcgcgctcgcgggcatgggcggcttcgtctatgcgctgacgacggcaaactgcgcctcgaacggcgacgtggcgggcttcggcttcctcgcactggccgttatgatcttcggcaactggaagcccgtgaatatcgcggtctcctcgctgctgttcggcctcttcaagtgcatcgcggcgagctacgcgagcatcgacatcaacggcgacggcgtctacatgctcgccgagatcggcatcagcgcccatctctaccgcatgctgccctacatcgtcacgctgctcgtgctggcgttcacgtccaagagctcccgcgcccccaaggccgagggcatcccctacgacaagggccagcgctaaattacataagaagcggtatggcgcagccataccgcttctttgcaaaatgaaagagagaactgtatggaagttagagagatcacagcggcagaggagaagcagcgcattgcgcgcttgattttagaatcactgcccgactggtttggcattccagaggcgcgcgaggaatacatcgagaaaagcgcaaagcagccgttttttgccgcgttcgacggcgagaacgccgtcggcttcctttaccttgccgaaacggggagggatacagcggaactctatgtcatgggcgtgctgagagaataccaccgccgcggcgtcggcaagatgctctttgccgcagcgaagcagcgggcgaaggagcttggctactcgttcttacaggtcaagaccgtgcagatggggaagtaccccgagtacgacgcgacgaactgcttctatctcgccctcggttttggtgagtttgaggtattcccgacgctctgggacgagtggaatccgtgtcaaatctacgtgatgagcctgaaataagaaaatgttggaactttttcccgccgttttgcgtctataaaagcagaaaaacaggggagggaagcatatgaccgtccgcgaaccgaaaaaacgctctaatttgcggctgaagctcggcggcgcgtattttagcgcgcagcgaaaactcagatggctttcgatgcggaaacattttgcgcgcgagcgcagcggggaagacttagcatatcaggcgttttcccaccatacgccgctcatgcgaaagctcaaggacgtcgacatgcagctccagcgcaacaaggtgacgaatctccgcctcgcctgtgcgcggctcgacgggcttttgctgcgccccggtgaaacgatgagctactggtatctcatcggaaagccgacggcggggaagggatatctgcccggtatgatcctgcgcaacggcgggtatctggccgcgacgggcggcgggctctgccagctctcaaacctcatctactggatgacgctgcacacgccgctcacggtcgtcgagcgccaccgccacggctacgacgtctttcccgacgcgaaccgcacgcagcccttcggcagcggcgcgacctgcttttacccctatcttgacctgatgatccgcaacgacacacaggacacctatcagatgcgcgtccgcgtcggcaaaacagaccttgagggggagtggcgcgtgagcgccgagccgaccgagcgctatgcggtcgtagagcgcaaccacgagatgcgcgcgcagtactggggcggctacatccgccacaacgagctctaccggcagacgcttgacttgcagggcaacctgctcgcggaaacgcccgtcgccgagaacgacgcggtgatgatgtactcgccgtatctcgaagaaagcaaaaaggaaggctgacaaagtcaaccttccttttatcttattcagccgtttcgtccgcctcttcgggcgtatcctcttcctcgggctcttcccacggctgcatcgtggcgacgcagcggttgatgttctcgccctcggcatagaacttcgcctcgtagtcggtcatcacgccgcactgtccgttcgcgtgcagatcgcgcgtgacctcggagagggtgaagccaaactgtggaatttcttcgatcgaccactcgaacagcgggtcgttgtcggtcttgaaatgaatttggccgttgtccttgagcaccttgcggtagagcttcaagaaattgccgtgcgtcagccgacgcttggcctgccgcttgggcggccacgggtcgcagaagttgacatagatgcggtcgacctcgccctgatcaaaaatctcagggagctggttggcgtcgatgtcgataaagaagacattgtgcagctctgccttcgccgcgcgctccatcgcgacgaccatcgcgtcgggcaccttttcgaccgcgatgagcagcacgtcgggctccgccgcggccgtctcgacggtgaagcggcccttgccgcagccgagctccacgcggatctctttcgcctcgggcatcaagtcgtgccagcggcccttgcgctcgtaggggtccctgatctgatatgcctcgcaccgtttcatgcggggaagcaggtttttctttttgcgcattcgcatagaatgaacctcgttttcctataattaaagcctatcatatcgaaaattggtgcaagagacaagtcattttaaaaattttatacaagagttgctgcattgggagaaaagatcattaaaaatgcaacgtttcttgcaatgacggcggaaaaccgtgaaacttttttgaaaaaagtgatttttctcttgcaaatatgccttgccgcccatataatagggggcagttgaagaagacaggaggagacacacgatgtcttttgtcaaatatgaacccaagggcaacattgcctatctcatcattgaccgcgaaaaggcgctcaacgcgctcaattctcaggtgctcgccgatctcgatgccgcgctcgacgcggtggacttaagcgagatccgctgcctgatcgtccgcggcgcgggcgagaagtcctttgtcgccggcgcggacatcgcgcagatgaaggagctcagcaaggaggaggccgaggccttcggcaagcagggcaacgacgtcatgcgcaagctcgaagcgttccccatcccgacgatcgcggcggtgggcggctatgccctcggcggcggctgcgagctcgcgatgagctgcgacttccgcatctgctccgataccgccgtcttcggccagcccgagacaggccttggcatcacgccgggctttggcggcacgcagcgccttgcgcgcctcgtcggccccggcatggccaagcagatgatctacaccgcccgcaacatcaaggcggacgaggcctaccgcatcggccttgtcaacgcggtctatccgctttctgatctctacgccgcggcggaaaagctcgccggccagatcgctggcaacgcgcccatcgcggtgcgcgcgtccaagcaggccatcaacgacggtcttcaggtcgacattgaccgcgccgtcgtgatcgaggagaaggccttcggctcctgcttccagagcgctgaccagcaggagggcatgggcgccttcctcgaaaagcgcaagcacgagccctttatcaacaagtgattccatagaattatctatttatattgtaggaggatacacacaatgaaagttgcagttttcggcgccggcaccatgggcagcggcatcgctcaggtcttcgcggccaagggccacaccgctctgatgtacgcttccagcgtcgcttccgctcagcgccacaaggataagctcgccgcttccctgcagaagcgtgtcgagaagggcaagatgaccgaagaggccaaggacgccatcctgaacaacatcctcgtcgaggagaagtctgccgcggcggacgccgacctcgtcatcgagtgcgtggcggagaacatggacaccaagcgtcagctcctcggcgagctcgacgagatgtgcaaggagagcaccgttttcgcgaccaacacctcttctctgtccgtcaccgagatgggcctcggcctcaagcacgccgtcatcggcatgcacttcttcaaccccgtgcccagcatgaagctcgttgaggtcatccgcggcgccaacaccacgcaggagaccttcgacttcatctacaacctctccaaggagatcggcaaggagcctgtcgaggtcgctgaggctccgggcttcgtcgtcaacaagatcctgatcccgatgatcaacgaggccatcggcctggttgagaccggcgttgcctctgtcgaggatatcgacaaggccatgatgctcggcgcgaaccaccccatgggccccctcgccctgggcgacttcatcggccttgacgtgtgcctcgccattatgaacgtcctctacagcgagaccggcgatccgaagtatcgtcccgctctgctgctcaagaagatggtccgcggcggccagctcggcaagaagtccggcaagggcttctacgattacagcaagaagtaatccgtccctaaaaggataaaaaggggaggcagtttacaaaaactgcctccccttttctcttttggaatggaaaggattcctgaaaatgacagaaaactgtcataaaaggaacggaaatgtcaaaaagactttaatgaattcggcgaaaagcacgaattccaaaaaggaatgatagttcctcttgcgaaaatgaaacgcacaggatataatgaaagtcacggaactgatttgtgaaaaattagacaatccaattatttttatatagtgaaggagcaaaagactatggatttccatctgtccaaagaacatctgctggtccgcaaaatgtatcgcgaatttgcagaaaatgaagtcaagcctttagctgaggaactcgatgaggaagagcgcttccccatggagaccgtcgaaaagatggccaagctcggcatgatgggcatttacttcccgaagcagtacggcggcgccggcggcgatgttctcagctatgccatgtgcgtggaggagctcgctaaggtttgcggcaccaccgctgttatcgtttccgcccatacctccctctgctgcgctcccattttcgagaacggcaccgaggagcagaagatgaagtatctgcctgaccttctgtccggccgcaagatcggcgcgttcggtctgaccgagcccggcgccggtaccgacgcctccggccagcagaccaccgctgtcaagaacgagaacggcgactacgtcctcaacggcagcaagtgcttcatcaccaacggtaacgttgcctccactttcgtcgtgttcgccatgaccgacaagagcaagggcaaccacggtatcaccgccttcatcgttgagaaggacttccccggcttctccaccggtaagcacgagaagaagatgggtatccgcggcagctctacctgcgacctcgtcttcgaagactgcgtcgtccccaaggagaacctgctcggtaaggaaggcgaaggcttcaagatcgccatgaagaccctcgacggcggccgtatcggtatcgcctcccaggctctcggtcttgccgaaggcgccatcaacgaggctgtcaagtacaccaaggagcgtatccagtttggtcgccgcctgagccagttccagaacacccagttccagctggccgacatgcacacccgcactcaggctgcccagtacctcgtttacgctgccgctatgaagaagcagaatcacgaggattactccatggacgctgccatggccaagctcttcgcggccgagaccgcttccgacgtcacccgccgcgctgttcagctcttcggcggctatggctacacccgtgagtatcccgttgagcgcatgatgcgcgatgccaagatcaccgagatctacgagggcacttccgaagtccagcgtatggtcgttgccaagtatcttggtgtgaactaaaaaaggaggtaaagatataatgaagattcttgtttgcgttaagcaggtccccgatacctccggtaaggttgccgtcaatcccgatggtaccctgaaccgcgcttccatgcagaccatcatcaaccccgatgatatgaacgccgttgaggccgctctcaagctcaaggatgagctgggctgcaaggtcaccgtcgtcaccatgggtcccccgccggcagaaggtatgctgcgcgagctgatggccatgggcgctgatgacggctatctcgtttccgcccgtgagttcggcggttccgatacttacgccacctcccagatccttgccgccgctctcgacaccatcggtctcgatgacgacgacatcgtcttctgcggccgtcaggctatcgatggtgataccgctcaggtcggtcctcagatcgctgagaagctgcacctgccccagatcacctacgccgccgatgtgaagaaggaaggcgacaccctgaccgtcaagcgcatgctcgaggacggctacatgaccatcaaggctcagactccgtgcctgatcacctgcatcaaggagctcaatactccgcgttacatgagcgtctccggtgtgtttgagtgctactccaagcccatgaccgttctggactacaacgccctgaaggatcaccccctcatcgacgctaccaccatcggcctcaagggctccccgaccaacatcctgacctccttcacgcctccccagaagggcgctggccagatgctcgagggcaatgacatggctacctgcgagaagctcgccggcatcctgctcgaaaaacacatcatttaaggaaaggagatcaatacgatgcgtaacgaagtgaaacttgctaatcccaactatgactcctccaagatcgaagagttcaagaacgtatgggtcttctgcgaacagcgtcagggccagatgatgtccacctcctatgagctgatctccgaaggccgcaagctggcggacgagctgggcgtgaagctctgcggtctgctggtcggcgacaatgtcggcgatctcgccgagagcattggcggctacggcgctgatgaggtcatcgtctgcgaccaccccctgctcaagaactacaccaccgacgcctatgccaaggtcatctgcgacgtcatctccgagatgaagcccgaggccttcctcatcggcgcgaccaacatcggccgtgacctcggcccccgctgcgcagcccgtctgcacaccggtctctgcgccgactgcacccacctcgacgttgacatgcctatctacaaggacttcctgcgcggcgcttccacgctgcccgaggccaagatcgacggcatggccaccgcgaaggtcatgggtaaggaccacgatgtctctcgcgacctgaagatgacccgtcccgcgttcggcggcaacctgatggctaccatcatctgcccgcgcttccgtccctccatggcgacggtccgtcccggcgttatgaagaaggctgcttacgacgaggcgaaggccaaggccgttaaggtcaccaagtacgacgtcaagctcgacgccgccgatctccagaccgaggtcgtcgaggtcgtcaaggctgccaagaagcttgtcgacctggttggcgctgactacatcgtctccgtcggccgtggtatctccaaggacgtcgagggcggcatcaagctcgctcacgagctcgccgacgtgctcggcggcgttgttggcggctcccgtgttgccatcgactccggctggctcactgccgaccatcaggtcggtcagaccggtaagaccgtccacccgaaggtctacgttgctctcggtatctccggctccatccagcacaaggccggtatgagcgagtccgagtgcatcatcgcggtcaacaagaacgacaccgcgccgatcttcgagatcgccgactacggtatctgcggcgacctgttcaaggttaccccgatgctgatcgaggccttcaaggccgcgaaggcgagcaagtaaaatactcaaaaaaagaggacaccgtaaggtgtcctctttttttgctttttacaccagctgcgcgcagaaattgcttgccgcaggcaagcaatttccacacttgcgggcgagaagtatttttctgacgcacatgtcgtcagaaaaataattataattatttcgcgcctatgggcgcgaaactctgcgaggctttttgccgagttagtgtcggtgacatgcgttttgacaaaatttacgtctggtttcttgttgcttcgtgcgcatactattgcttgggtatcgcgggagatgaacgtaaggagaaatgcagagatgaagcagacccttgccatgctttttgtgacggcgctgctgctcttctcgctcgcgggctgcggggagaagaaggacagcaacaccgccaacggcccgtcgaccggtacgaccgacaacggcgcggcggacagcggcaaaaaaaaggataacatgccgggcgacgacatgagcggcgaaaacaaaaaagacgacagcgtgaccggcgacggcatgatgggcgacgacatggacggcgacggagagaatacgacacgcagcgtcgaccgccgcaatgccgccgcgagcgccagcgaccgcagccgctattttggcagcgacaagaccatcacgcacgaaaacggcaacctctacggcaagacctatctgaaccccaagacggaaaagagcgcaaacgcgcagctgcgcagcaacggacgcagtttgacaggcacaaatatcaatggaatctcgaacgatgtgcgttaccggcagatgctgtcgaacggccgtgtacacgatacggacggctttttgttcgacggcgaaaatacgcactacaacaccttaaagtgaagaaagcgggagcggcatgctcccgcttagcttttgccgtattgacgaaccgcattcacctggatataatgaaatacaacagaaaggaagtgccgccctatggatcgtgagctccgcgttgttctctccgcccgtgtgttttccgaccagaaatgctttggccccggcgtgtcccagcttttgaagcgcgtagacgagctgcattcgctgcgcgcggcggcgctgtcgatgtccatggcctattccaaggcgtggacggtcgtccgcaatgccgaggacgggctgggcttccatcttttgacctccacggcgggcggcaagcacggcggcggcgcggagctgacggacgaggcgcggcagatgatcgccgcctacgacgcctactgcgaaaagctgcgcgcctacggtgccgcgctttttgaagagacattcgctttctacaacgatatcccaaaacacgagctgcaccgaaaggagaaaacgcatgattgacaagctttgcgtctgcggccacgcgatggaggatcgcggcgcgcagaccctcgagatgaacggctcaagcctcggttcgaatctctggacggatcacgtcccggtcgaagtgtacatttgctcgtggtgcggccgcatggcattctttgagccggaggacgtgcgcgaaaagcgctttcgggatgcctgcgaggaaatgacgatggacgagttgcgtgcgatcgtttacgatgccaatccggatatgctgcgcgctgttgcgcgcgagcgcattgaagagctggagtcgatcgagcgttacaaggcggagcagaagcaaaaagaggaggaaaggcgtgcaaagcgcaaaaaactcttttcgggcattctcggcagagacgaggacgacggcaagccgcccaaaaaccgcccgccggagttttgatgaatttattgtaaaagtgcgcacactgtgcgcactttttgcttgacaaacgggcgcggcgggtgtacactcccatcatcaaaatggcacggatagggaagaaaccgatatttccccgcgcagagagggatgcatttgctgcgagcatcctgcggaagagaccggcagtaccacccttgagccgcccgcgaaacaagcgggacgggatcgcccgttacagcggacacaagcggcgcgaaatgcgcaagcagggtggaaccgtggagtagttgaatgcttcacccctgagaacatcgggggtggagcttttttgcaccctcaagtgaaaatggaggtaaataacatgtctgaagaagtcaagatcaacgaagaaaaccagtttacgtttgaaaatcccgagtaccgcaagacctactggcacacctgctcccacgtgctggcgcaggccgtcaagcgcctctggcccgaggtgaagctcgccatcggcccgagcatcgacaacggtttctactacgatatgctcgccccgttctccttcacgccggagaatttggctgagatcgaagccgagatgcgcaagatctgcaaggaaaagctcaagctcgagcgctttgagcttccgcgtgccgaggccatcaaatttatggaagaaaaggaagagccgttcaaggtcgagctcatcaacgacctgcctgaggatgccgtcatcagcttctacaagcagggcgagttcaccgacctctgcgccggtccgcacctcgactccaccggccgcatcaagggcaacggcatcaagctgactgcctgcaacgccgcctactggcgcggcgactcgaaccgcgaggtgctccagcgcatctacggcgtcgccttcccgaagaaggaagagctggacgcctacctcgcccaggtcgaagaggccaagaagcgcgaccacaacaagctcggccgcgagctcgaatacttcaccaccgtcgactgcatcggtcagggccttccggtgctgctgcccaagggcgcgcgcgtcgtgcaggtgctccagcgctgggtcgaggacgtggagcagaagcgcggctatcttctcaccaagaccccgctgatggccaagcgcgacctttacaagatctccggccactgggatcactatctcgacggcatgttcatcctcggcgacccgtatgacgagacgaaggagtgcttcgccctgcgcccgatgacctgcccgttccagtatcaggtctacctgaaccgccagcgctcctaccgcgacctgccgatgcgcctgggcgagacctcgacgctgttccgcaacgaggattccggcgagatgcacggcctgatccgcgtgcgtcagttcacgatctccgaaggccacctcgtcctgcgccccgaccagctcgaagaggagttcaagggttgcctcgacctcgccaagtactgcctcggcaccgtcggccttcttgacaagtgcacgttccgcttctcccagtgggatcccgcgaacccgaacaacaagtacgagggcacgaaggagcagtgggatcacgcccagagcgtgatggagcgcatcctcaaggacctcgacgtcgactacaccgtcggcatcgacgaggccgcgttctacggcccgaagctcgacatccagtataagaacgtttacggcaaggaagacaccctcgtcaccatccagatcgacatgttgctcgccgagcgcttcggcatgtactacatcgacgaaaatggcgagaagaagctgccgtacatcatccaccgcacgtctcttggctgctatgagcgcacgctcgcctacctcatcgaggagtacgccggcgcgctgccgacgtggatggcacccgagcaggtgcgcttcctgcccgtcaccgaccgcgccgccgactactgcgccgagcaggccaagaagctcgaggacatgggcttccgcgtcgaggtcgactaccgcaacgagaagatcggccgcaagatccgcgacgcgcaaatggagaaggtcccctacatggtggtcgtcggcgaccgcgacatggaaaacggcactgtgtccccgcgccaccgcgcggacggtgacctcggcgcgatgagcatggacgagttctccgcgcttctcaagcaggtcgtggacaacaaggaaaagaaataatagcataccgattttgcataattagcatttgatcctttcatagaatcagggcggcgctttgccgccctgattttttatacctaaagaaaaaattgaaaacctgacaaatgtttaacgaaataatcggtcgaatgatgacggaattcaacgataatttggcgaaatatccaaaaaagtaaaaacgtcttgcaataaacctgtcatgcggttataatgagactgcctgaaagaggcaagtaaatttcggaattcaacgcttctccaacgtaggtgctccgaagcgcccccacgcggcggagcatgtgccggtgaagcggtgaatgccggaagaatcaaaaaggagattgcgtatgaaaaagtttttagctctgatcctctctctcgcgatggtcttcgcgctggtcgcctgcggcggtgagaagacggacgacagccagaacaacgacggcgacaccagctccgattcccccgtcgcgatcactctggcgaccggcggtacctccggtacctactatgctgtcggcggcgttctcaagaccgtcctcgactccaagctgaccctttccaagctctctgttgagtccaccggcgcttccgtcgcgaacgtcaacatgatcaccgacggagatgctcagatggccattctgcagtccgacgttatcaactacgcgcacgagggcaccaactccttcgacggtgctcccgagaccaacgctctttgggtcgccggtatctacaacgagaccgttcagatccttgccaagcccggcatcaacaccgtgtccgacctcaagggcaagaccatctgcgtcggtgacgttggttccggtaccgagatcaacgcctggcaggtcctcggcgctgcgggtctgaccaaggacgacgtcaatgctgtgaacggctccttccaggatggcgttgaccagctcaaggacggcaagatcgacgccgccttcactgtcgccggtgctcccacgaccgctatcgtcgactatgccaccaccaacaccctcaacctcgtctccctgagcgacgatgagctcgccgccatccaggaggcctatccgttcctgatccgtgacgacctggctgccggcacctacaccggtcaggatgccgacgtcacctgcgtcgctatccaggctactctggtcgcttccgaagagctgagcgaggatgtcgtttatgagttcgtcaaggccatgttcgacaacaaggacgctctgaccgaaggccacgccaagttcggcttcctcgatcccgaggctgcctccgctggtgctactgtcaccatgcatcccggtgctgagaagtactacaaggaaatcggcgtcctgtaagcaggatcgctaccgtgtattgacgtgaattctcatctgcggaaatacataattgcggccgctgcaataataacgattattgcagcggccgccgtgcttcttcctcgctccggctactatctgaccctgcgcaaccgcgacaccggcgaggtctacgcccggtacaaaatgggcgagggagaccgcttttccgtgacctttatccattccgtgaacaaataccccctgaccgatacctacgagatcgaaaacaaaacgatctatgtggaggagacgacctattgctcctttggcgcaggcgtgcagacggagctaaaccccggcgaaacgcttgacaaggtctatgtggaccgccccgattacaagggctgggcaatggtcatccgaaacatccatcaggacaggacaaacgtcggctacattgtcggtacggtctctgaccatgtactcaatgtaaacggcgaggatgtcagtctgcgtgatttgtgtggaaaaaacgcgcctgtgcgttttaattacgaattctggctcgtctgagcgcacggacgctctcaaatagaattaggaggaaattgcatcatggctgaaaatgaaaagctcaacaatgttgcagtcgacaacgacgtcggcaccatggaagacgtcgatgcgatcatgaaaaagtacgaccgtgagtcgaacacgcgcgtctgggaaggcactcccagaaagatcctgcgtgtccttacggcactgttcggcattttcctgatcgtgatgaacatgtggatcaagatggacgagcgtgcgcgccgtccgctcttcctcggcctggtcatcattctcgtgtttatctactaccccatcaagaagggttctcagaaggtcaactacatgccctggtacgatatcgtcatggcggcagtcggcgcgttctgtttcttcttctaccccttaaaccttgaaaaaatcgtgtctgccggtacgcgaatccagaaggcctttgtcgtgcagatcggcagcgtttccatcccccttctgatcgtatttgcaatcatcggcactttgatcctcgtcgagtgctgccgccgcgtggtcggtatgccgatcatctgcgtggcgacggtgttcgtgctctacgccttcttaggcgcgggcaaggacttaaagaccgttatgtataacctcttctacaccacgaccggtatcctcggcaccccgatcggcgtctgctcgacctacatcgcgctgttcgtcatcttcggcgccttcttggaggccacaggtgttgcaaacttcttcatcgactgcgcgaacgcgctggtcggctgggcttccggcggtcctgcaaaggtcgcggtcgtttcctctgccctctgcggcatggtctccggttcctccgtcggtaacaccgttaccaccggttccgtcaccatcccgatgatgaagaagaccggttatcccccggagtttgccggcgcggtcgaggctgcgtcctccaccggcggccagatcatgcccccgatcatgggcgctgcggcgttcctgatggcggaaatggtcggcgttccctatgctgatatcatcgtgcgtgcaattctgcccgcattcctgtacttcctcggcatcttcctcggcgtgcacttcaaggccaagaagctcggcctcaagggcctgccccgcgaagagctccccaagtggaagatcctgctcccgcagatctacctcatcctcccgctggtcgttctggtctacatgatcatgatcggcttcacgatggccaccgccgccgtgtacgcgaccctttactgcgtggtcgtcgccatgatcagccgtgaagagggcaagaagaagctcgtcatggccatccccctgatcccgcttctgttcatgaccctcatgagccgcagcttcgagccgggcaccttcatgggcgagaacggcagcacgctctgccttgccatcgccttcgcgctgctggttatcaactacgccatcagcaagcccaacgtcaagagcctgcccaccatcatcgacgcgtttgaaaacggcggcaagaactgcctgagcgtcggtatcgcctgcggtatggctggtatcatcgccggcgtcgtcaccatgaccggtctcggccaggtgctcatcggcgcgatcgtcggtctgtccaacggtcacctgatcatcgctctcgtgctgacgatgctctgctgcatcgtgctcggcatgggcgttcccaccaccgcgaactacatcatcatggccaccacctgcgcgccgatccttgcctccggcatgggtctcgaactgatggctgcccacatgttctgcttctacttcggtatcgtcgcagacatcaccccacccgttgcgctggctgcctacgccggttccgccatcgccaaggctcctccgatgaagaccgcctggaacgcgacccgtcttgccatcgcggcgttcatcattccctacatctttgcttacaataacgacctgatcttcgttggcaccgacgtcaacttcctgagcgttgcctccgtcgtcatctccgcgaccctcggtatggcgtctatcgcctccggcctgatgggctacctgatccgcgatatgaagtggatcagccgcatcgcgctggtcgccggcggcctgctgatggtcatccccggcacggtcaccgaccttgcgggtcttgcggtgctggtcgtcgtcctcgttctccagcgtatcgagaacaagaaggacaaggcggctgcgtccgtgtaacgcaaagcatcctatcaatcaaaaaagagaccgcttcggcggtctctttttttgcatgtgcgccgcttttcaagcataagctggaaacgacgggaggttttgcacatgcccagaatttatttgagtccctccacgcaggattggaacccgtatgtcgacggcagcggcagcgaggaatactggatgaatctgctggccgacacgctcgagccgtacctttacgcaaacaccatctcctttgtgcgcaacacgccggagatgaccgcggcctcgtccatcgcgcaggcgaacagcctcggcggctttgacttttaccttgccctgcactccaacgcctcgggggaggggcagacggggaagaaccgcggcatcatcgtcttttactatcccacgagcagcgacggaaagcgtgctgccgagctcttcgccgcgcagctgcgcatggtctacccgctgcctgcaaaggtgacgacgcaggcgaccacgacgctgggcgaggtgcggcggcccagataccctgcgaatctcatcgagctcggctatcacgacaattacgacgatgcgcgctggatcgaaaataacctcgacgccgcggcgcaggccatcgcgcggggactgacggagtatttcggcctgccgttcatttacccgcagctcgtgcgcaccggcgtcgtcacgacggagggatcggcgctgcgcctgcgaagctacccgggcatcgacggggaaatagtcggcagcatcccgaacggcgaaagcgtgcaggtctacggcagcttccagggctggtactccgtgggctacgacgaccagctcggctacgcggcgcaggcctacatcgcggtgtgacattcgcccgtttccgatattttccgaacgcgacttttccttgacagctggtcataaaaagtttacaatgttttttggatttatggaggggagagaaggggaatctcccgtttatgattcaaaaacccaacgatagatcaatcgcatcgatcaaaaaaagcacacaggaggaatcgcatgatcagctatctctacgctgcgcttatcgcggtggggacgctcgtcattggcattcttcttggtatttggattcgcaagagagccgctaagcgcgccgaggagaagatctccaacgccgatgaagaggctcttcgtattgtcaacgaagcgatcaagagcgctgaaaacaagaaacgcgaagtcatgttggaggcaaaggaagatatcctgcgctccagaaacgaatacgagaaggaagtcaaggaacgccgcgccgagcagcagaagcaggagcgccggctccagcagaaggaggagaacctcgaccgcaagaccgacgcgctggaaaagcgcgaggaggctctcaaccagaagcatgccgctctggacaaggaaaacgaagaaatcaagatcatcaagcgcagccagaccgaaatgcttgagcgcatttccggttttactgccgaagacgccaagaagtacctgatcgagcaggtcgagagcgaagtgacgcacgagaccgcgctcaagatcaaggagcttgagcagcgcgccaaggacgaggccgattcccgcgcccgcgagatcgtcgcctctgccatccagcgctgcgctgccgaccatgttgccgagatcaccgtcagtgtggtgcccctgcccaatgacgagatgaaaggccgcatcatcggccgcgaaggccgcaacatccgcacgatcgaaacgctcacgggcgtcgacctcatcatcgacgacacgcccgaggcgatcaccgtctcgtgcttcgagcccgtgcgccgcgaggtcgcgcgcctggcgctcgaaaagctcatcgccgacggccgcatccatcccacgcacattgaagagatggtcaacaaggcccgccgcgaggtggacgccatcatcaagtctgagggtgagcgcgccgtgctggagaccggcatccgcggtctgcaccccgagcttgtgaagatgctcggccgcctgcattaccgcacgagctacggccagaacgttctgcagcactccatcgaggtctcgcaccttgcgggcatgatggccgccgagctgggcgcggacgtttacgccgccaagcgcgcaggcctgctgcacgatatcggcaaggccgtcgaccacgagatggagggtacgcacgtcgccctcggcgttgaatttttgcgcaaataccacgaaaaggacgacatcatccatgccgtgcaggcgcaccacaacgacgtggagccgcagaccatcgttgcctgcctcgtacaggcggcggatgcgatctctgccgcccgtcccggcgcccgccgcgagaatctggagaactacatcaagcgcctcgagcagcttgaggagatcaccggcagctatcccggcgtcgacaaggcctatgccattcaggccggccgcgaggtgcgcgtgatggtcaagcccgaccaggtcagcgaggaccagatggtcattctggcgcgcgagcttgccaaaaaaatcgaggaagagatggaatatcccggccagatcaaggtgcacgtcctgcgcgagacgaccgccatcgaatacgcgaaataagaaaaaggctccgcttttgcggggccttttttcatgcctttcttgcgttttgtcccgcgccttgctatactggggaaaacgcaaagcggaggaacgccatgctctacaatattctggccatcggcgatgtggtgggcggctgcggcgtcagctgcctcgagcgccatctgcgcgccgtgaaaaaactcaagaacatccacttcaccgtggtcaacggcgagaatgccgcgatggtcggcctgacgccgaacgacgccgagcgcatcttctccgcgggagcggacgtcatcacgcttggcaaccacacattcggcaagatgcagatcaccgactacctcgacgactgcccgtatattctgcggccgcacaatctcggcgcgcgcgtgccggggaggggctacggcgttttcgactgcgggcgcgcccgcatcgcggtgatgaacctcatcggccgctgcgacctcgcgttccatgcggacaatccgttcaaaacggcggacgagctgctcaaaagcggcgaaaagccgacgttcacgctgcttgacttccacgccgaggcgacgagcgaaaagctcgccatggcctattacctcgatggccgcgtcagcgccatctggggcacgcacacccacgtgccgacggcggacgaagaggtcttccccaaggggacgggctacctcacggacctcggcatgacgggggcggtgcgcagcgtgctcggtatcaagcccgagcagtcggtcgagacgtttctcggcggtctcccgggccgctaccgcgagccggagaagagcgccggcaagatgcagggagcgatttttacattggatgacgcgacggggctctgcgtgggcgtcgagcgcgtcgatgtgcgctgaaaaagcgcaaaatagaaaggaacaacgcaaatgtccatcgaaaaagtgagagcctattttgaacacttcggcatcgccggccgcatccgcgagttcgacgtgtcgagtgcgacggtcgaactcgccgccatcgccgtcggtgtggagggcgcgcgtatcgccaagtccatgagcttcaagctcgcggacgacgagcccatcatcatcgtgacggcgggggacaggaagatcgacaacgccaagtacaaggcgtatttccacgtgaaagcaaagatgctgacctttgacgaggcctgcgcattcaccggccacgcgccgggcggcgtgtgctcgtttgcactgccggagaatgtgaagacctatctcgatgtgtcgctcaaacgcttcgacacggttttccccgcggcgggcagcgcgaacagcgccatcgagatgacctgcgacgagcttgagaagtattcctcgaactttgtcgcctgggtcgacgtgtgcaaggagaaagcgcccgccccgcaggcgtgagaggagagaacacatgagcgtgaagatcgtccacgcggcggacttccatttggacagcgcgttcggcgcgctgagcgccgagcaggcgcgccagcgccgccgcgagagccgcgagctgctgacgcggctttgcaattacgtgaatcagaacggcgtcgatctcgtgctgctcgcgggcgacctgttcgacagcgacacgacctatcgcgagacgctggaagcgctctccgacgcgctgggcgcaatgcaggcgcgagtgttcatcgcccccggcaaccacgacccgtacagcgcgaagtcgccctacgcgacgcttgcgtggccggagaatgtgcacatcttcacgtcgaagacggtcgagcgcgtggagctgccggaactcgggtgcgccgtgtacggagcggcgtttaccgcgccggtgcaggatgagagcctgcttgcgggcttccgcgcaccggaggacgatttcatccatctgatggtgctgcacggtgatatctccgccgcggaatcgcgctacgatcccctcacgaaagagcagatcaaggagagcgggatcgactatcttgcgctcggccacacacaccagttcggcggttttctgcgcgaagggcagacgacctacgcctactccggctgcccggagggccgcggtttcgacgagctgggcgaaaagggcatccttacgggcacggtggagcgcgggaaggccgaactttcgtttgtgccgttcgcgcgcagacggtatgagatcctgaacgtcgatgtgacgggaagatcggcggaggacgcgctgcgagcaagcctgccggatgcgactgtgcgcgatatttaccgcattattttcaccggagagacagatgagcgcgggcttgatctcaagtcaatcgaagagcagtttgcgcccgacttcttccacttggagctgcgcgatgagacgcgcattggcgaggacgtctgggcgcgagcgcaggaggattcgctgcgcggcctgttcctgcgtgagctgcgcacgaaattcgatgttgcatcctcggacgacgagcgcgcgaagatcagcctcgccgcgcgcttcggccttgctgcgctcgatgggcgcgatttgtgaggaggagaactatgtcgatctggtacagccggcggaaaaaggaagaaaagtccctgcgccttgcggcggcggggaagtccgcgttctgctttgcagagcttcattatgacgcgcgcagccttgcgcacgctgcaggtgtcgcggcggagagagcgctccgcctttatcgcaaaattgaccgaaaaagataaggaaacaaccgaaaaaggccgaaaggaagcccctttcggcctttttgagaggatattaagtaagaattaagaaacaatcgctgtttttgtttgaaaacggctgatacaatgaccaacatgaggtgagaaaatgtacaacattctgatttgtgacgacgaacaggacattgtcaacgcgctcaagatctatctctccggcggggactactgcctgtttgaggcgagcaacgggcgcgaggcgctggaggtcgtggagaagaacgacatccatctgatcctgatggacatcatgatgccccagctcgacggcatcgccgcgacggcgaagctgcgcgaaaagagcaacgtgcccatcatcctgctcacggccaagagcgagagcagcgacaaggttctgggcctgaacatcggcgcggatgactacatcacaaagccctttgaccccgtggaggtgctggcgcgcgtcaggtctcagcttcgccgctatacgcagctgggcgcgaagaaggaagaggagaagccgaacgtctacaccgtcggccccatcgtgctcgacgaggagaaaaagagcgtgacggtcgacggcgacgaggtcgcgctcacgcccatcgagttcaacatcctgcggctgctgatgaagaacccgggacgcatctattcctctgcccagatctacgagctggtgtggaaggaggattcgctgggggcggagacgtcggtgagcgtgcacatccgtcacctgcggcaaaaattggagatcaacccctccgagccgcgctacctgaaggtcgtgtgggggctggggtataaaatggaggacaagaaatgaaggctgcgtggatacgcaatttctggacaaagacggtcgcttttttgctggcggcggcgctcgtgccgatgatcctcacctatgttgtggggctcgcctactcctacggcggtatgggtcgggacttttacacgagcaacctctgcctgaatgcagtcggcaaaaagacgtgggagatctgcgacgactatatcgccatggaaggcggaaactatgagctcgacaagatctactccaagggagacagctacagcaacattcgcttccgcgtgacggacgagcaggataaggtggagttcagcaacgtcagcgacggtgataccttctgctacagcaccgtttatgttgacaagacctttgatgtctaccttgtgaagggccttcccgcgcaggacgacatttactgggcaaaggtattttacgacaaggcagaaaactgggggcagaacgccctggagatgctcatcctctttggcgcgatggagctgttcctgctcatcttcctcgcccgcacggcggcgcggcgcgaggacggcgagctacagggcggctggcaggaaaagatccccttcgacctctatcttctcgttgacggcacgatcattgcactgctgtgcgtggcggtggaggaggtctactcctatgtgagcttctataccccgccctacgatgtgctgctgctggggataagctttgcgctggcggtgctcgtctttgccgcgtgggtgacgttctgcgcgcgcgtcaaggtgggcggactgtggaagggaacgctcatctataaggtgttatgcctgtgctggaagatcgtcaagtggtgctggcggacgctctgcgccttctgtcgcggcgttgtgggtttgctgcacgccatcccgctcgtctggcgcacggcggtgggctgctttgtggtcagcatgatgctcggtatatttgcggcaaatcgcgcgggaggggcgatgctgctgacgatgcttgtgctgtccgtcgccgcgtgcctcttctcgctccagcttcgaaagctccagaaggagggcgaagccctcgccgccggcaatcttgacgcgcaggtggacacaaagtggatgtattgggacgttaagcgttacgccgagaacttgaattccatcggcgacggcttggctgcggccatcgacaagcagctcaagagcgagcggctcaaaacggaacttatcacaaacgtttcgcacgacatcaagacgccgctcacgagcatcatcaactacgttgatcttttgcagcatgagcacactcccgcgcaggaggaagaatacctcgccgtcctcaagcggcaggcgttcaagctcaaaaagctcacggaggacttggtcgaggccagcaaggccacgaccggcaacctgccggtgaacgccgtgcggtgcagcatgaacgagcttttatcgcaggtcgagggcgagtacggcgacaagctgagcgcggcggagctgacgctcgtgagcgtgatgccggacaaggagctcttctgcaatgtggacggcgcgctgatgtggcgcgtgatcgacaatctgctctcgaacatctgcaaatacgcgcagaatggcacgcgcgtttatctgacgcttgaaaagaccggcggcgatgcggtcgtgaccttcaagaacacctcgcgcgcggcgctgaacattcccgccgaggaattgatggagcgctttgtgcgcggcgacagctcgcgctcgaccgagggaaacggcctcggcctctccatcgcgcagagcttgacggagctgcagggtgggaagatgtcgctcgccatcgatggcgacctcttcaaggccatcctccgtttcccgacggtggtgtgagaaaaatacagaaaggtgcggaaaggcgttgccgctccgcaccttttccgcgcctgtgcttgacaattcggcgcaaaaacaatacaataacagttcagaactctatcctgaaactgagggagaacataaacatggcaaaagataaaaaggtagaacagatcacgaatctggaagacgattttgcccaatggtataccgacatctgccgcaaggcggagcttgttgagtatgccagcgtcaagggctttaccatcctgcgcccctatggcttcgccatctgggagaacatgcagcgtttgatggacgcggagttcaaaaagaccggacatgagaacgtggcgatgcccgttctgatccctgagagcctgctcaagaaagagggcgagctcgtcaacggcttcgcgcccgaggtcgcgtgggtcacgatgggcggcagcgagaagctcgaagagcgccttgccttccgccccacgtccgagacgatgttctgcgaccactggtcccgcgtattgcagacctaccgccagctgccgatgctctacaaccagtggtgctccgtcatccgctgggagaagaccacccgcccgttcctgcgttcgcgcgagttctggtggcaggagggccacaccatccacgagaccgccgaggaggcgcaggccgagacgatgcagcagctcaactgctacgccgacttcttccgccacgtgctcgccatccccgtcgtccccggccgcaagaccgacaaggagaagttcgcgggcgccgaggcgacctataccgtcgagtgcatgatgaaggaccgcaaggcgcttcagggtgcgacgagccactattttggcgataagttctcccgcgcctatgacgtgaccttcaccggccgcgacaataagctccagtacccgttccagacgtcctggggctccaccacgcgcatgatcggcgcggtcatcatgacccacggcgacaacaacggccttgtcctgcccccgcgcatcgcgcccacgcaggtcgtcatcgtgcccatcgccgcgcataagaatcccgaggtgctcgagaccgccaagagcgtgatggcggacctcatcgccgccgacgtccgcgtcaagctggacgacagcgaccagtctatgggctggaagtgcgctgagtacgagatgcgcggcgtgcccatccgcctcgagctcggtccccgcgacctggccgagggcaactgctgcctcgtccgccgcgacaacggcgaaaaggtcacggccaagatcgaggggatcgttgacgagatcaaggcgctgcttgacgccatccatgacaacatgtacaccgtggcggaaaagaatctggaagacaacacgtttgatcttaaaaccatcgacgaggtcaaggagatggcctccggccgcggcggcttcgctcgcaccaagtggtgcggtagcctcgagtgtgagctcaagatgaaggaacaggcgggcgtttcctcccgctgcatgcccctcaagcagagcggcaccaccggcaagtgcgtctgctgcggcaaagagtgcactactgatatttattggggcgttgcctattaagtatcagctttccatcgaatgatatagttcccctgcaccgtgcaggggacggataaggggggctattctctttccgaggaaagagaatagccccccttgcaccccccaagagaaaggtttagattggcagtttggagcttgaacaatctttgtgcctccggaatgcagctgcctgcgcgcggcgttgccgcggttggtattgctatacgatttgatttgctcctactatccgctgccgctctgctcatcttgtaggagtgcaaactaatttccgcctaccggagcactcatcaatgcggcgagcgcagcaatgccgcattccgcaggcagtctgccgccgaggtaacgtcactcgcgcctcacgatagtaaggcgcggttgctggatgtgtcgaatcgcagggattcatggcgaagccatgtacactgcacctgattgcgcagcgtgtgcagctcttcaagccccagaccggcgatgtcggagggcgaggggagctcccctcgcgttctcttgggggtcaaagggggccattctctcacgtgagagaatggccccctttattcacgcagaccttgggctgcaatattcttcccttaaaagggaaattttccaaaaatcaaatgagattcttctcagtagaagcatcaaacaaatgcaccagtttggcatcaaacccaaacttcaccgccgtatgccgcgcatacgccatcggatcaatattcgcggtgggaatgactgccacaacatcctgcccattcgcggcaaggtgcagatgcagctcgcttcccatcagctcgctgacgtcgacctcggcagggatgccgctctcgccgagcgcgatatgcacggggcgcacgcccgcggtgacactgcggctctcgacgcctgcggcggcgagctttgcgctctgctccgcggtaagcgtgacggtctcgcccatgacggtgagcgtatagctgtcggcagtcttcgtgagctggcagttttcaaagaaattcatctgcggcgagccgatgaagcccgcgacgaacaggttcgccggatggttgaagacctcctgcggcgtgccgatctgctggatgtagccgtcgcgcatgatgacgatgcggtcgccgagggtcatggcttcgacctgatcgtgcgtgacgtagatgaacgtggtgtcgattttctcgcgcagcttgatgatctccgcgcgcatctggttgcgcagctttgcgtcaaggttcgagagcggctcgtccatcagcagcaccttggggcttctgacgatggcgcggccgatggccacgcgctggcgctggccgccggagagcgccttgggcttgcggtcgaggaattgggtgatatcaaggatctctgccgcctcgcgcacgcggcggtcgatctcgtcgttgggcattttcttgagatgcgtcttgccgtccgcgtccgtctccgcgatcttcttgagcttgagcgggaaggcgatgttttcatagacggtcatgtgcggataaagcgcatagttctggaagaccatcgcgatgtcgcggtccttgggcgcgacgtcgttcatctgcttgccgtcgatgaagagctcaccgccgctgatctcctcgagaccggcgatcatgcgcagcgtggtcgacttgccgcagccgctcgggccgacgagcacgatgaactccttgtcggccacatcgatgttgaagtcctgcacggcgacaacgccttcgtcggtgatctccagattgttcttcttttcgacggcctcgtctttcttctttttcttcttgctttcggtgttggggtagatctttcggacatttttcagaatgacctctgccataatcgtgaaccgcagtcctgccgcctccgcgatgcaggacctcgcagccgcctgagcgcgccgctttacggcaggtctccacactgccgcaccgccggttcggcggaaaacgttcctccttttgtatttcccgcgggcggtacgtaaaaggtggagtagcgcaggcgggagggaatggaagtgagcaaaattgcccaaattcagtatacggcaaagcgcggctttccacaacggaaaaccgcgctttcatgctgtattttggtaagatgaataacaaaaagtgccgaaatttatgcctttttaccacggcggtggcgatagacgaccgccagccggtcgatgagcagatcgtagacgaaaaagagcagcagccccatcgccgccgtcgcccacagcagccacgctgcgctctcggaaaactcctgcaccacggcggggagcttaaagacaaagatgatgagcgcgtacatgacgcccatactcacggcgcagagaccgagcttcgccagaagccgcagcgctttgggcgagatcgcgtcaagattcggcttcacgaggggataatagccgagaaagcaaaaaacgagggccgcttccttatccgcgcagagaagaagtcccaagaccgccgccgcggcaaagcagctccatgcgtagcttttgcggcattcctcgcgcgcgggcaaaagcgtagccgatgcgaggatcggccaggcgtaggtcgagagcggaatgacgccgctgagccagaggaaggcgaccgcgagcgcgcacagtacgccgcacagcgccagttcatgtgttttctttgccaaaatttacttcacatcgcttttacagatattccggctccatcgcgtcgtggagcacggtggtgatcgcgtcggaaaagacgctgtcggaatgcgcgtgtagggcgttgagcgtttccgccacggcggcgacctttaccttgccagtggagtacacgtcctgatcgaagatgaagcgcacttccttttcttgtacctgctgaacctgattgccgctgcggatgttgcgctggacaaagccggggcccgcgtgcagcttgagcgccgcgagcgcatcgagcttgcgctcgacgtcgaccgagcacttggcgacacttgcctcgtccacgtcgtcctcgtcgagaatgccgaggtacggcggctggagcagatcgttccagcggcggcccgtgaggccaagctgctcgcgcgaaatggcgttcacaaagcgaagccccacgcggtcaaagcagttgggacggtaaatcttgataaactggccgagcggctcgtcgagacgggcggcaaagtcctcccagtgcgtgtagcgcatggtggaaagggcgataaagtccttcgtgaggctcagcttgtagccgccgtcctcggaaatgaacgtgtggttgttgaccgtccgcgcgggcgcgccgttcacgccgggcagcttttccacctggcactggtagcgcggaaatgccgcgcgcacggtctcctgaaagtcggcgggctcgcgcgtgtcgatcgagaggatcgtggggaagcgcagctggcagatgacttcgatgagctgagatttgccgtaggcgtagcggcggttatcggaagagatcataacgtaaatacctccgtcatgttgcaattttgattataaattatagaggaaagaaaaacgattgtcaaatcagcgttcgtgcgcgaagaagcgctgataaaacttaccagcagaaaaactgcatatccgattttttatgagtcaaactacccttgcgatacccaaaccgcaaaactctttcaaacaggtgaaaccaaaaacaattgtaggaaaaggagaaaatcattatgtccagcaagaacagcaacaagctcaacatccccgaggccaaggccgctatgaacaagttcaagatggaagccgccagcgaggtcggcgtcaacctcaagcagggctacaacggcgatctgacctcccgcgaggccggttccgtcggcggccagatggtcaaaaagatgatcgagagctacgagaagaacctgtaaaaaaggctctttcgcaaagcgcagacaaagggcgcggccaacaggccgtgccctttttctgctgtgatggacgaaataacagaagatattctgcaaagccttccggcacgctcgctccgcgcgggaaaacgctgctttcccgcgcggaggagacaaaagggcaggggacttgccgcccttggtgctcattttgcgcaatttatttgcaaaaataccttattgcattttctgttgatttgatataaaatttcaataactgtgcatgtattacttcaaacggaaacatacgcgcgcgggaaagcggcgaaccgaggcgggcggcctgccggaatacgcagggaggtgtccgtatgcgcgccatcgagcactttaaaaccatcacgcatcatcgccatctggtgcggcaatactgttttcgcctcggcctgtactatcaggggttaacgcatgacctgagcaaatacagcccctcggaattctggcgcggcgtcaagtattatcagggctaccgcagcccgaacgacgccgagcggcgcgaaaacggcgtgagccttgcctggctccaccacaaggggcgcaaccgccaccactttgaatactggatcgactactgtatcggcgacaacggaaaggtctacatgggcgggtgcaaaatgccgctcaaatatgtagccgaaatgttctgcgaccgcattgccgcctgcaaggtctatcagggcgacaaatataccgacgcctcggcctacgactactacgaaaagtcgcgcggccatatcctcatccatcccgagaccggcgagctcatcggcaagatgctgctcgtactcaaggagcagggcgaggacgcggcgttcgactatgtgcgcgctcttctgcgcgaggaaaagcaatgtccgacaaaatgagaaaactgtcagaagatcgcttgcaatcctgcatatttcagagtaaactattttcattatagaattttaacagaggacggacaagaaccaatgactcatccctacaagacgcgcgagggcggcgcgacggtaacgatctttgtaccctacgattgccggaaccactgcccgttttgcgtgaacaagcaggaatacgcccatgctgagggcttcagcgtggaggcgatcctcaagagcatcgccgtgatggacgagatcacgccgcgctgcgattttgttttcaccggcggcgagccgtttgccaacttaaaagcgctccagcgcatgctcgacgccatccccacgacccacaaggtctatatcaacacgaccttccccgtgcagcccgggtgcagtgcggaggagatgatcgctttcaccgagcgcaatcgcgacaagatcacctgcatcaacatctcgcgccacctgacgaagtatgtcgaggagtcgcccgacgaggtcgtcgcccgtatcgcaacgcccaagcgcgtgaactgcgtgctgtacatggactatcccgccgatgagcttgtggactacgcagagcgctggcgcaagtacaacatccccgtgcagttccgctacgactacacggaaaccacacccgagaacctctatcaggaggagggcgacaagattttggcagaccttaaaaagcgcttcacctacaagggccttgacggctgccgcatgcgcaacggctaccacttcgactacaagggcctgcacatgacctaccataagacgctgccctattccaccatcgtggagacgggtgacgacggcgtgacctatgatatcctctatgatatcctcatcaagcagactggcgagatccattccgactggacgggtgtgaagctcgacgtggacgcgtaccgcaaggtggtctacgagccctatgatctgcgcgtgcgcgagggcacgatcgacttttgagaaaggcggcaatactatgagctatcaggcggcagtcatcaccgtgagcgaccgcgcgtccgcgggcgtgtacgaggacaagagcggccctgctgtggccgcgatgctgaaggaggctggctacgaggtcgtgtacacgtccatcgtgccggacgaacaggagaaaatcagcgaagagctcatctcctgcgtggatgaaaagcactgcgaccttgtcatcacgagcggcggcacgggcttatctccccgtgacgtgacgcccgaggcgacgcgcgccgtgctcgagcgcgaaattcccgcgatcccgcaggcgatgatctattacagcttgcagatcacgccgcgcgcgatgctttcccgcgccgtggccggcacgagaagaaactgcctcatcctgaacctccccggctcggaaaaggctgcgcgcgaaaacctgagcgccgtgctcggcgcgcttgaccacgccctcaagatgatcgccggcggcgggcattgagtaaaaggtataaaaaaagctcccacgtataaaacgcgggaactttttttataccttttgcagggggatcatgatttcagtgacgaacttttccgtgtcggtcgtaaagccgtagtcgatgactgtaatctcgcgcgaaaatccggcggcgatgtagccttcctcgcggatgaactgcatcaagcgacggtactgtgcgggcgactcggcgtggtgtccgcggaagcgcacgcatgcgcagagcgaagcgggcagatcaatgacgtcgcccgcaaagcggtcggcctcgtcaagcacgaggaattcgccgtcgtactgcccgaagctgccctcgttcaagtgctcctgcgatacgctgaagccgaccttgccgaggaagaccagcgcctcggcctgcgcggcggcaagacggctcgtggagagctcgagcgcggaatagtccggcgcggtcagcgccgtgtcgatccagaaaaggcgaagcgcgggcgaatggatgagcgtgatctcgccgagcggcgcatgccgcacatcttggagctggctaaggcgcgcgtcgagcttgcgctcgatgcgcttgagctccttttgcttctgtacgacggcagccttctgcgcgcgcagcttttcttcgatcgtctctacatcgcggttttgcagaaaatcagcgatctcggtgagcggcatgtccagcgcgcgcagataccggatggtgttgagcggctcgaactggcggacgctgtagtagcggtagttcgtcgacggatcgacatattccggcgtgacgagaccgagcgcctcgtagtggcgcaggctgctcacgctgagatggaaaatttttgccatttcgccgatggagaaaagctggggaagagccatttacgttgcctcctgcgcacgtttttcccgccgcgtgaggatggcgtaggcgatcacgcagacaaggatggagaaaagcgaccccgcggcgttggcaaggcccatgggcagcagcgtctgcgggaagtatttggacgcaaggtacgcccccggcacgcgcacgagcaggatcgagagcgaattgtgcagaaacgagatgcccgacttgccgcaggcgcagaaatagccgctgaagctgaactgcacgccggcaaagaagctgtcccagatgtagccgcgcagatattgcccgcccgcggcggcgacggcggcatcaggcgtgaagaggccgacgagcggctcggcgataaacagggtgaggatgacgaccgcgatgccgaacgagcaggcgatcatcgcggcgtagcgcaacgtgagacgcgcgcgctcgggcttgcctgcgccgatattctgcgcgccgagcgccgagacggtcgagagcatcgacgacgggatgaggaagaggaagccgatgatcttttcgacgatgccgacggcggctgcgtccgtcagaccgcggcggttggcgatgatcgtgatgatgacgaacgagacctgaataaagccgtcctgcagagcgacgggcacgccgatctgaaggagcttacccatgacggcgcgctgcgggcgaaagtccgcgcggcggacggagatgagcctgcgcttcaagatgaccgcgagcgagacgaggacgctcaccgcctgcgagagcgtggtgccgagcgccgcgcccgcggggccgaggtgcagcgtgcccatgaagtagtagtcgagcgcgatgttgacgacgcaggccacggcgatgaagtacatgggactcttgctgtcgccaaggccgcggaagatcgaggcgatgatgttgtacgccgtgatgaacggaataccgatgaagcagaccgtgagataggcgagcgtgccctgcacggcctcctccggtgtggacatgatggagacgatccccccgcgcagcgcgagcagcagtgccgtcagcgcaagagacagcagtatgaagagcgtgaccgtgttgccgatggcagaggcggtgcgctttttgtcgccgccgccggtggcctgcgcgatgctgaccgtcgcgcccatcgcaaggccgacgagcatgactgtgagcatgtgcatcacctgcgagccgatggagacggcggtcgtgctggcgacaccctcaaactggccgatgatgaagaggtcggccatgccgtagagcgtctgcaaaaagtaagagagcagatacggcagcgaaaaggacacaacgttgcgaaagacgctgccggtggtgagatcgttttgcatcggaaaggactccttatcagtatagcatggagtcatcataaactctataacaattgtagagtcaagcgtagatttttccgcgcggaaaaaagtctcactttcccggatagcccagtgcggcggaaagcatctgccccgcggcgacgaccgcgcgctcggcgtgcgcgaactcgtccgagtgcacggagcggaacatccccagtacgctgacgacgtacttgagcgcgccgccgccagtgaacaccggcgcggagatggagcgaagaccgatcttatactcaccgttttccacggcgaagcccgcttcgcggcaggcggggagcgatgcgagcaaagcacccgcgtccgtttctgtgtgcggggtgtagggcgtgagcggcacacgggcgagcagatttgccgcctcgctctcgctcatataggcgagggcgatcttgccctgcgaggtgcagtgcagcggcagccgcgcccccggcgcggagacgatgcgaaggctgtcgcgtccctcggcctggtcgagggcgacgatgtgcccgttttcataggtggagagcatggcggaggcgtctgtttcgtccaccagatgctcaaggtaaggccgcgcgagggacgagatgttccagaacgcgctggcgcggcagccgtattcaaaaaggcgcaggccaagggcgtatttgccgtctgcgtgctgtgtgatgacgtcatagtcgcgcatggtggtcaaaaggccgaacactgtactcttgggcagccctgcgcgctcgctgatggcggtgagcgtcatcgcctcgcccgcgtcgctgaggagctgcaaaagctccatcgccttcgccacggagcggatggtgttgccgtcagtcataaatcggccctcccggtcaaaaatcgttgcttgtattctaaaaaatactgcggaaaaagtcaagattacgataatataaaaatacagttcgacattatcggacgactgtgttgcgtaagagcgtgatatttgctaaaatatcatgctgtaccatggaagaaagaggcgtttcagatgctggacggctttgcaagatcaattacatacctgcgcatcagcatcacagaccgctgcaattatcgctgccgctactgcatgccggacggcggcattgaaaagtgcgcgcacgaggacatctgttctttggaagggctgcgcgacatggccgccgcggcggtcaggtgcggcgtcaaaaagatccgcgtcaccggtggcgagccgctcgtgcgccgcggtgcggtggacttctgccgcatgttatcagaaattcccggcgttgaagagctctgcgtcacgacgaatggcagcctgctcaaagaagttgcccggccgctgcgcgacgcgggcgtcacgcacctcaacatcagcctcgacacgctgaacgaggagcgctttcgcgccatcacgcgtcttggtacgctgcaggacgtcctagatggcatcgacgcggcggagcgcgcgggctttgcaaagatcaagctcaactgtgtgctgctcggcggcgtcaacgacgacgagatcgccgattttgtggacttaacgcgcgaacacccctggcaggtgcgcttcatcgaacgcatgccgatgggctgcggaaaggatttcggtacatacctcccctcgcaggcggttttggaccgctgtccggagttggaggccgtttcgcacgacggcgtggccgcgtgctatcgtctgccggatgcaaaggggaccgtcggcctcatcgcgccgatgagtcatgcgttctgcgcagagtgcagccgcatccgcatcacggcggacgggaaattaaagccgtgcctgcattcggacgcagagatcatgctgcggggcttgtccggtgaggaattggagcaggccatccgccgcggcattctgatgaagccggagcgccaccacatggacgagactggcgtcacggagacgcaccgcggcatgtttgcgatcggaggctgagaatggaactgacgcattttaacgaacagggccgcgcccgcatggtggacgtgagcgaaaaggtgcagacctatcgcgtggcgcgcgccgccgcgacggtccgcatggcaaaagcgacgatggacaagatcaaagagggctccatcggcaagggcgatgtgctggcggtcgcgcaggttgcgggcatcatggccgcgaaaaaaaacagtgaactgatcccgatgtgccacccgctgctgctcacgaaggtggacatctcatttggaatcgaagaaaccgccctgcacatccgcagcgaggtccgctgccacggtgaaacgggcgttgaaatggaagcgctgacagccgtcagcgtcgccgcgctcacggtgtacgacatgtgcaaggccgtgcagcgcgatatgcgcatcgacggcatccaccttctctataaagagggcggcaagagcggcgtttatgaagcggaggaatgaagaaatggcacaggtgaccgctgtgaacatcagcgaaaaaaagggcgtgcgcaagcacgaggtgccctatatcgacgtaaaataccgccacggcattgtgggcgacgcccacgcgggtgactggcaccgccagatcagcctgctggccgacgagagcgtggacacaatgcgcgacatctgcccgctcgagctggacgcgggtatctttgccgaaaacatcaacacccgaggcatcgagctcaagacgctccccgtcggcacgcgcctgcgcgtgggcgagacggagcttgaggtcacgcagatcggcaagcagtgccacaacgactgcgagatcaagcgcacgacgggcaaatgcgtgatgccgaccgaaggcgtctttgccattgtgatcaaagagggccgcattcaggctggagacgagatcgaggtgctgaagaaatgagacttatcaaaaccgaggacgcggtgggccatgtgctctgccacgacatgacgcagatcatcaaggaccagtataaggacgcgcgcttccgcaagggccatgtcgtgacggaggaggacatccccgtgctgctcagcatgggcaaggagcacctctacgtctgggagatgacgcccggcatggtgcacgaaaacgacgcggcggagcggcttctggccctctgcgggcaggagaatatgatccgcagcggcgtgaaagagggcaagatcgagctcaaggccgcctgtgacggcgtgtttctggtcgattccgcgcgccttgtcgctgtgaatagccaggacgaggtgatgatcgccacgcgcaagggcggcaccgccgtgcgcgagggcgacaagctcgcgggcatgcgcgtcattccgctgatcatcgaggaagaaaagctccgaaaggctgagcaggccgcgggcgataagccgctgctgtctctcaagctctatgttcgtaagaccgcctgcattgtcgccaccggcggcgaggtcaaaaagggcctcatcaaggatacgttcacgccggtcgtgatcgacaagctcaagacctacggcatcgaaacgctcgaggtcgtctactccggcgacggggtggagaatgtgcgcgacgcggtgctcgcgatgcgcgaaaagaagcccgacatgatcctctgtaccggcggcatgagcgtcgaccccgacgacaacacgccgggcggcatcaaggccgcgggcgcgaatatcatcgcctacggcgcgccggtcctgccgggggctatgttcctgctcggctattttgacgacggtatgcccgtcatgggcctgcccggctgcgtgatgtacgcgggcgcgacggtcttcgacctaatgctgccgaagatcgcggcggacgtgcccgtgacgcgcgcggatatcgcggcgctcggtgagggcgggctgtgccttgggtgcaagccgtgccactatccgatctgcccgtttggaaaataaaacttcaaaacgatggcggagccaacgttttgaggggggggggacagcctgctgcgcgcactcacttatgctcgcacacttgcaggctgagaggtgttttttgccacgcgcatggaaattggcgaagcgccgccagcggcggatgaagcgagccagtttcgaggaagcggcacgattggcacgcccaacgggcgcgggaatcgtaatgccgcgacggtgaccgcggcaaaaaacggatcaagattatttgccgccgtgcgcggcggcaaagtctgcgacgctgtttcgcgccccaggggcgcggggttaggaggggcaggactggtggatttttgaaccgaatgagtcggtgctgttttgacaacttcaacacttcgcgcctgcgggcgcgaaatgttggggggtgcgttatctattttgagaatagcgaaatgattttgtccaagttccccgctggggattggaaataaattgcgtgcagcgtgttcttgcccgtttctgtatcgccgcgcttttcaatgaacgtgcgaaaaagaaaaatttttgaaaggaagtatccaaacatgaaaaagcttttgcctctgctccttgcgcttgcgctcgtgttctctctggccgcctgcagcagcaagactgacgacataaccaccgacgacacccaaggcgatgcgaacgccgagagcgttgatctcgtcgtcttcgccgccgcctccatgaccgagaccctgacggagatcgccgagatgtacaaggaggtcgtgcccaacgtcaacatcacctacaacttcgactcctcgggcaagctcctcacccagatcagcgagggcgctgactgcgacctgttcatctccgccgctcccaagcagatgaacgccatggatggcagccttattgacgacaaggacaagaaccccgacggccttgacctcatcgtgaccgacagccgcatcgacctgcttgaaaacaaggtcacgctcgtcgttcccgagggcaaccccaagggcatcgagagcttcgaccagctcgctgaactcctcaagagcggcgacgtcatactcgccatgggcaacagcgacgtgcccgtcggccagtacacccagaagatttttgcctactatggccttgatgagggtgcgctcaccgactgcctgacctacggcaacaacgtcaaggaagtcaccactcaggtgagcgaggccagcgctgactgcggcatcatctacgccaccgacgcttactccgccggtctcacggtcgtcgacagcgccaccgccgagatgtgcggccaggtcatctatcccgccgccgtgctcaagggcgaaaaggaagaggccgcgcgcgcattcctcgcctatcttgagaccgatgccgcgatgaccgtctttgagcgcgtcggcttcagcgcggtttactaaaatgaaagcctaaaaggctttcattttaaagagctgcactacgctctgcgccttggccgctcacttcggtgagcggccttcgacgctcgctgcgtgagaggtattttttgccatgcacatgtcgcggcaaaaaatttcaagattatttgcgccgtgcgcggcgcaaagtctgcgacgctttttgatatctcttccggaagagatatccccttttgtcccgttccctgccgcaggatgcggcacaaactttccgccgcatttgcggcggcgtggagattgcctgaatctcccggactccagaaaatcggaggtcacttatggattggtaccctttatggaactcgctgcgcattgcggcgatctccacggtcgttattttctttgccggcatttttgccgcctattatatcgcaaagcttccgcgcctggtcaaaggtgtgctcgatgtgcttctgacgctgccgctcgtgctgccgccgacggtcgtgggctatctgctgctgcgcgtgttcggccccaagcgcgtcatcggcgcgtgggtgctcgaaacgttcggcgtcaagatggtcatgacatggtggtcggccatctttgccacggtggtcgtcatcttcccgctgatgtaccgcacggtgcgcggcgcgttcgagtcttttgacgagacgctggcctattctggacagacgctgggcctgtcgaatacctacattttctggcggatccgcatgccgtactgccgtcagggcgtgctggccggcacagtgctggcctttgccagagcgcttggcgaatacggcgcgacgagcatgatcgcgggctatacgcccagcaagaccgcgacgatctccacgacggtctatcagctctggcagacgaacaacgatgtgctggcgacgaagtgggtcttggtcaatattgcgatctccgccgtcgtgctgctggcggtcaacatgctcgagcggcgtgacttcctcacggatgcgagcaaggcgaggaggacgagcaaatgagtttgtccgtcgatattgaaaaaaagctcggtgcgttcacgctgcattccaagtttgaagcgccggatgagacgatggcgctgctcggcgcctcgggctgcggcaagagcatgaccctggagtgcatcgcgggcatcgtgacgcccgaccgcgggcgcatcgtgctcggcgaccgcgtgctgtttgacagcgagaagaagatcaacctgccgccgcagcagcgcaaggtcgggtatctctttcagcagtatgcgctgttcccgaacatgagcgtagagcagaacatcctctgcggcatccgcagcggcgacaaggcggaaaagcgccgcgtgctggcggagaagatccgcatgttccgtctcgagggactggagaaggagcatcctgcacagctctccggcggccagcagcagcgtgtggcgctcgcgcgcatcctgtgctctgagccggaggcgatcctgctcgacgagccgttctccgcgctggatagctacttaaagtggaaccttgagatcgagctcgccgacctgcttgcaacgttcaacggccccatcctctgggtcagccacgaccgcgacgagtgttaccgcaactgccgcagcgtttgtgtgatggaaaacggacggaccggcgaggtcacgccgatggacgaaatgatccgccatccgggcagcgtcagcgcggcgcgcctcgcgggctgcaagaacttttttgccgccgaggcgaaagacggcaaggtctatcttcccgagtggaacgtgtcactgctgcttgctgtcacggaaaaggcctttacaacgctcggcattcctgacaataccgtcaccctgagtgaaagcggcggaatggcctgcaccgtctgccgcatgatccccggcgtggaagagaacatcctcctcctgcgtccggaaggcagtgccgaaggcgcgccgatgctacgcatcgccgtcggacacgaaagtgatctgcaagcgggcgcagccgtccgcgttgcgctggactacagcaaactgttactcctgtgaattaaaaaagtgagggcagggcaatacccagctctcttttttcgtcaaaatataaatacaattcgtaatattctgtcgaaatataacgaaacacggcggttttgggcgtatgcccaaaaccgccgtgccatattttccttacaggcgcccgtagatgcgggtcgtctcgtggatggactttgcgagctttttgctcgcctcgccgctcagcatgcgccactgccagttgccgctgctcgtgccgggggtgttcatgcggcagcccttgccaaggcccaggtagtcctgcatctgcgcgacaaacaacctgctctggcagctcatgccgccgcggatgatgccggcgttgaagccctcctcgtcattgagaccgaggtacttcttcgcgaacgcgatgtccgccttatccgcctccgtgcgccagagggcaaggggcgcgttgtcgtgcgtgccggtgtagcaaatgctgttgaaattgcagctgtgcggcaggtagtcgctcgggtcgcgcgagtcgaacgcaaactcgaggaccttcatgccgggaagaccggaatcggagagcagctgcacgacctcgggcgagggatagccgaggtcctcggcgatgaaatcgaggtcgcggaaccagccggtcagcacgccgacgagcgacatgccggggcccttgacccagcggccgtttttggcggtcgtctcgccgtagggaatggcccagtagctctcgaagccgcggaaatggtcgatgcggatgacgtcgtagagcttctgcgcgccgccgatgcggcggatccaccagccgaagccgtcttttgccatggcctcgtagttgtagagcgggttgccccagagctgcccgtcctcgctgaagcagtcaggtgggacgccggagacctcggtgggcacgttgtgctcgtcgagctggaacatttcgggttctgcccacacgtcggcggagtccatcgccacatagataggcaggtcgccgatgatgcggatgccgagcgagtggatgtacgccttgagtgcctcccactggcggaagaagagaaactgaatgtaagtgaaaagctccacatcctcgcgcagctcggcgcggtagcgctcgatgacctcgctgcttgtgcggcagcggatgtcctcgtcgtcccattccgtccaggacttcatgccgaagtggcgcttgagcgccatgaagagggcgtagttcggcagccagcgctcattttcccgctcaaatgccgcgacggcctcgcggtcgcgcgtaaagccgcgcgtcttggccttttcgagcagcgtgaagcggctcgcgtagattttgccgtagtcgacatagcgggaatcttcgccccagtcgcaggcgttgacctccgcgcgcgtcaggagcttatctttgacgagcaagtccaagtcgatgaaatacgggttgcccgcaaaggacgaaaagctctgatacggcgagtcgccgtagctcgtcgggccgagcggcaagagctgccagtatttctgccccgcggcggcgagaaagtcggcaaagtcataggcggccttgcccatcgtgccgatgccgtggggcgagggaagggacgagatcggcatcagaatgccggaggaacgttcgatcaatggaaccacttctttctggaaaatgaaggatgaaaggtgttaaccctttaccgcgcctgcggccacgcccttgatgatgtacttctggcacagcaggtagaacacgatgacagggatgatgcttagcaggatcagcgccatcgtcgcgccgaggtcgacggtgccgtagctgcccttgaggtactggatgtggatggggatggtcatgtacttcgtgcggtcgagcacgagatagggcagcagatagtcgttccacacccacatgatctcgagaatgccgacagagatcatcgtgggccgcagcatcggcagcacgacggagaagtacgtgcgcagcgggccgcagccgtcgatggcggccgcctcctcaatttcaagcgggatggatttgacaaagccgacgaacatgaaaatcgcaagccccgcgccaaagccgaggtagatgatggggatggtccagggggtattgagcttgagggtatcggccgtcttcgacagtgtgaacatcaccatctggaacggcacgaccatcgaaaagatgcagagataatagaccatgcggcagaatttgctgtccacacgcgcgatgtaccacgcggccatcgacgtgcagagcaaaatcagcgcggtcgagacgatggtgataaataagctgtagccggcggattttaagaacgggtagttgccgaacgtcagacccttgatgaagttcgaccagccggcaaagctctccgcgttcgggagggcgaacgtgtcggtcttgacataggtgttgagcttgaaggagttgatgaccaccgtaaggaccggcagcacatagatgacgcagatgacgccgagcacgatggaaaggatcgtcttgcggcgggcttctgcggaaagagagcgcttgttcattactgctgcacctcctttttgcggttggcactgagctggagaagaccgatggtcgcgacgaggatgaagaacagcacggccttggcctgcgcggtgccgcgcgagttggcattctgcccgtagaacgtgttgagaatgttcagcgcgagcatttcggtctctttgatcgagctgccgtcggacaggatggtatagggctgcccgcccgtgagggcgaggttctggtcgaagagcttgaaaccgttcgtgagcgataagaacgtgcagatcgtgatggagggcatcacattcgggatcgtgaccttccaaagcgtctgccagcggctcgcaccgtcgatcttcgcggcctcgagcatgtcctcgggcacggcttgcaggcccgcgatgtaaatgatcatcatgtagccgatctgctgccagcacatcaggatgatgagcccccagaagccgtactttgagttgagcaggatcgacgtgccgtagcgcgagaggatgccgtcgaagatcatcgaccagatgtagccgagcacgatgccgccgatgaggttcggcatgaagaacaccgtacggtacaggttgctgcccttgatgccctgcgtgagcgcgtaggccaccgcaaaggccagcacgttgatcagcacgagcgatatgacggcaaacagcgccgtgaaccagaacgaatgcacaaagctcgcatcctggaacgcgcggcggtagttttcaaggccgacaaaatgcgcgtcgctcgtgaccttgaatttgcagaaggagagatagatgcccttgcagaacggatagacaaagccgatgatgaacgcgcagaccatgggtcccataaagagcgggaaccagcggcggatcgggcggcggatcatcgagctgttgaccgcagcgttgctgtgcttatgtttcaattcgatcaactcccagccaaagatagaatattgcgttttgtttctgcacggcgggcgcttcatgcggcgctcgccgtgatatgcagggaggggcgggcgaaatcgcccgcccctctcatttgtgcttttcagatgcgcttgcttttttaaaagcggcttaaccgttggcggcagcgtactgcgtggcccagccgtcgacaaacgcggtcttgacgagctcccagttggcatcgctctggtcggcgtcgtactggttcatcgcggagacgagcgcagcgcggtaggcgtcaacgttcggctggaagttggtgacccagggcatgatgtagttgccgttggtggtgtagtcgttggcgtcggcgaggaagccgttggtggactcggcagcctgcttatagggcatggcggcgaattcatcaaccagcatacgggagacctcgggatcggtgaccatccagttcatgaattcgagcgtggcctgaatgtcttcctcggaagccttggcgttgacagcccagcagttctcggtgccgcagttgagacccgcgttctcttcgcccgcaacaccgcagtagaacgggatcatggacaggttgtcaagaccgtactgaccgtcgccggtaccggtgagcttggcccactcccaggagccgttctgatagaacacggcctgctccttgccgaactcgtccgccgcgtcaaagccgccggcagcgagatcagcaggattcacggcgctgttgttgatgtacagatcccacaggttcttgtagttctgcatgtaggtacccttgatggaagacgggcattccttccaggcgtcgggatcgtccacggactcgtagtaatactcgaggttcgcgaggtggccggtgaagcgccagctggaatcgtcgctcatggaagaggaggtgaaggcgtcgaagccgagctcggaagcacgagcgtggatgccctcagcgacggccttgagagtctcaaagttcgtgatgtcgccaagcgtgtagccggccttttcgagcagatcttcgttgacgatgatgccgtagcactcatagcagtagccgatggagcagagcttgccgtcggcgtcatagaggttgtaggcgtcggtgttgagctcgttggcaacggcggtgccgctcaggtcatagcagtagtcgccccaggtgtcgacagcggcctggttgcccacgacgaacagcgtcgggggagcggacttgtccatctcggcggtcagggtctcgttgtaggtgccggaagcggcggtcacgacggtgacgggcacgccggtcttctcggtgtacatggcggcgaccttctgcagggtctcgtcggcttcgggcttgaagttcagccagtagacgcggccggaggcagtatcgccgtcgctgttgtcagcggagtcatccttcttatcgccgcaggcgacgagagaaaacgccatgacaagagcaaggatcattgcaagatactttttcatttcatcaatactccttttcaaatttattttcacgcggttcccgcgggaaaatcagtgcttgagctgccgcacggacgcaccctcgcgcagcgcggtcggcagagtgacatggcgatgaacgccgcgtccctcgatgatgtcgagcaggatctcgacgctcgcctctcccatggcggtcatgggctggcagagggtggtgagcatgggatgaatgtattccgagacgctgatgccgtcgatggcgatgacggagcagtcctcagggatggagcggccgctttcgcgcagggcgcgcatcgcgccgatggccatgtcgtccgcgatggcgaacacggcggtaaaatcggcgggggagcgcagacgcttttgcatggcggcgtaggcgttggcaatggtgaagtcttcggcacagatcaggtcctccggatgctccgtgagaccaaaatcgcgcagcgcgcgctgatagcccagatagcggagctgggagatcgagctgtcgtcgggagcggcggtcaacacggcgatgcggcggtgaccgtttttataaagctcgctgaccgcgcggtaagcctcctgctcgtcggcgatggagacggaggagtacgattccggcggaagcgtgccgtaggagttggtgtaggagcagcagacgtagggcacgccgagaagcgatacctcctcgggcgaataatcactgcgtccgccgagaaagatgatgccgcgcaggcgcttttccttttccatcaccgcgccgcactgaatttcgtcatcgtccgacggaatttgacgcatgaccatcgtgtagcccgaagcgtcgagcttttgctcgatggcgtggatgatgtcggtgtagaaggggttctgcacgccgcgcaccacaaggccgaccgcgtcagaacgaattttgacgaggtcgcgagcgctgttgttcggcacataccggtgcgcctcaatgacggcgcggacccgcctgcgggagtcctcactcacgtcgggacggtcattgagcacacgggagacggtgctgacgctcacgtctgcgagctttgcaatatccttgatggtcatgccgacgcgccccctgcgatgattccggaaaccttaccggtaacgtttccaatccttgcttacagcatagcccccaccgcggacaaagtcaaatgaaacttgctgtttgtggtaaaaatgggggaaacacacaagaaatgcctgcgccttgttgacaaaatgaccaacgaccggcgcaaatgcgttcttaacagcaagcttatgagatgcctgtaccactttatgagcggcttatagcaaaatgcgggccaaaatcggcgtttctgtgcagaaacgaaaaaattccccgttttccgccgctatgcggcagaaaacggggaacgatctgtggtttaaaaagccttacttgagcagcagctccgcgatctggatggtgttggtggcagcgcccttgcggacctggtcgccgcagcaccagaggttcagaccgcgctcgtcggtcaggtcctcacgaatgcggccgacatagacgatgtcctgatcggacgtgtcgagcggcatggggtagaccttgttcttgaggtcgtcgacgagcttgcagcccggagcgtttgcgatgagctccttggcacgcttgacgctgatcttctccttcgtgcgcagcacgacggatacgctgtggctgcggatgacgggcacgcgcgcgcaggtgcagctgaccttcatctcgggcaggtggaggatcttgcggccctcgttctgcatcttcatctcctcgctggtgtagccctcgaaggcctcgccgccgatctgggggatgatgttgtacgcgatctgatactggaagaccttgggctcaaggtgcttgccctcggaaagggccttgacctcattgttgagctcatcgatgccgcccttgcccgcgccgctgacggcctggtaggaagaggcgatgatcgtctcgatggggctctccttggcgagggcgttaatggccacgagggtcacgatggtggtgcagttggggttcgagatgatgcccttgtgccacttcacgtcctcggggttgatctcggggatgacaagggggacgttggggtcgagacggaacgcgctcgaattgtcgacgaacaccgcgcccgccttgacgatcgagggggcgaagcgctcggcgatgtcgttttccgctgcgccgaggacaatgtcaaggccctcgaacgcgtcgtcagacgcctcaacaatggtgcactcctgaccgcggaacatgattttgctgcccgcgcttctggcgcttgcgatgggacgaagggacgcaacggggaagttgcgctcttcgagaattttgatcatttcctgaccgacggcgccggtggcgccgagaataccgacattgacctgtttcatactacattctccttcacaaaactattgtacaggacacggatggcctgttcgaaatctttttcttccacgcccacgatgatgttgagctcttcggggccctgcgtgatcatgcggatgttcacgccgttttcgccgagcttggcaaaaatcttaccggaaacgccgggacggtacgccatcttgcggccgacggcagcgacgatggcgatgtgctccgttacggttatcttattcggctgcacctctttttgcagctcgcccagcatttcgtagagtgagcgggacaccttgtcggacgagacgacgagcgagacgttgtcgatgccggacgggaggtactcgacgttgacctcgtgcttggcgagcacgttgagaatttttaagagcgagcccggttcactcgaaatgccggtcttggcgatggtgatgatggaaaagcccttcttgccggcgatgccggtgatgaagccgccctcatccatctcgtcgccgatggattccataatcattgtgccgggatggtcgggcgcgttggtgttgcggatgttgagcgggatgttcttctcgcgcacggggaagatcgtgccctcgtgcaggacctgcgcgccgatgtagctcagctcgcgcagctcgctgtaggtcacgcggcggatgggctcgggatcgtcgacgatgcgcgggtcggccatcaggatgccggagacgtccgtccagttctcatatacgtccgcgccgagagcagccgccgcgagcgcgccggtgatgtcactgccgccgcgggagaacgtgcggatgtgcccgtcgggcatcacgccatagaagcccgggatgacgaccctgcggtcctcggcgagggagcgcagcgccgcgtaggacgcgtcctgatcgacggtgccgtcgaacttgaacttgatccagcgggccgcgtcgacgaactcatagccgaggtattcggccatcagccgcgcggagaagtattcgccgcgcgaggcgagctcatcctggctgatgccatttttcatcttgtcccacagcgcgtcgaactctttgccgaggctgatgtgcaggccacattcggcgatgatctcgttgtagcggtcacgaatcatggcgaagatgtcctcgcacgaaacgccgtacttgatgtgcgcggcgcagagatagagaagatcggtgatcttatggtcgccggagaagcgcttgcccggcgcggagacgatgaccacgcggcgagcggggtcggcttccacgatggacttgaccttggcgaactggcgggcgtcggcgagcgacgaaccgccgaatttcaaaactttgagcatggagtttattcctcttcggccgcgtagcgcgcaagcagcgcgtgcgggtcgtcctttcggtaagattcataggcgtcgaacgcctcgcgggcgctgcactcgcgggtaaagtattcgcccatgcagcggaacagccacttgcactgcgtgccggagaggttcaccgagcagggggtgaaagagtcagcatagaagctgcggcagccggcggcgacgtcgagacagtcgcgcagcacgttcgagccggtcgggtagccgcctgcgcccgcgccggaaaagctctgcttgccaaaacgcgatgcgaacagcgtgacgaggttgccggtgccgtcggtgtgcgcctcgggcgcggaggaggggaaaagcgtcgggcagacgaacgcggccacggcacggccgtttttctccgctcgggcaatgagcttgtaggtcaggccctcgtccttcgccttggcgatgtcgcccgcggtgatggacgagataccgacacaggggatgtcctcttccctaatgttcacgccgaaggcaaggtcggcggagaggacgatcttgcggcgcgcgtccagaccctcgacgtccgcggtggggtcggcctcggcgtagccgagctcctgcgccttgcagagcgcgggcgcataatccgcgccagaattcgtcatggcggaaagcatgtaattcgttgtgccgttcagaatgccctcgacagccttgatctcatcgagctcggacgcgcgggagagagaggtgagccaggggatgccgccgcccgcggcggcggtgcagcgcagcgccacgcctttttcttttgcaagggaggtgagctcttcaaagtgggcgcacatgagctgcttgttcgcggtgacgacgtgcttgcccgcacgcatggccgcgcagaggtagctgtacgccggctcgatgccgcccatgacttccaccacaatatcaatcgagggatcgcgcacgatctcgtcgtaatcggcggtcacggtgcatgtgagctccgggcggggacggcgggagagaactgctgcaacatgcagatcagttcgcccctcgcacagcttataaaaatgggaaccgacggtgccgaagcccagcagcgcaatattcacggggaatgaccttctttctttttttgatactccgtcaagtgcggacgaatttgtgacttacgccgaaactgtccgcgaaagaaaaacacttgactttttgatggaaacaatataacatagcgtttgtgaaaatacaatagggaaaacaaaaaaacttttcccgtgagatacaggaggaaacatccatgcagtatcagagtacccgtgacaaaaatttaaaggccagcagcgcgcaggccatcttaaacggccttgcccccgacggcggcctttacacgatgccgtcgtttgacgaggtcaagttcgactatactactgtattaaatatggacacgatgtccatgtcgacgaagatcttatccaagctcctgcccgacttttcagaagcggagatggcaaaactcgtccacgacggctataccggcaagttcgagaccgaccacctgaccccgaccgtccccgtcggtgaggacttcatcctcgagcttttccgcgggccgacgagcgcttttaaggatgtggcgctctcgatgctgccgcgtctgatgaccgcgtcgaaggaaaagctcggcgtggacgacgagatcatgatcctgaccgccacgtccggcgacaccggcaaggcggcgatggagggcttctgcgatgtgccgggcacgaagatcatcgtcttctacccccacggcggcgtgagcgccgtgcagcaggcgcagatggcgacgcaggcgggcgaaaacgtctgcgtgtgcgcggtgcgcggcaatttcgacgacgcgcagaccggcgtgaagaaaattttctccgccgtcagcaaggatcagctgctcgagggcaagggcgttcgcctgtcctcggccaactccatcaacatcggccgcctcgccccgcaggtcgtctattattatagagcgtacgccgacctcgtgcaggcgggccgcatccagccgggcgacaaggtcgactacgtcgtgccgaccggcaacttcggcgatatccttgcaggctactttgccaaggagatgggccttcccgtcggcaagctcgtgtgtgcgtccaacgccaacaatgtgctgaccgacttcctgcgcacgggccgctatgaccgccgccgccccttctacaagaccgtgtccccctcgatggacattctcgtctccagtaacttagagcgcctgctctatctcctctccggcgacgacaagctcatcgcggatctgatgaagcagctcagcgaaaacggtgagtacgaggtgccggccgagatgcttgaaaagctgcacgagctcttctgggcaggcttctgcgacgatgagggcgcgaaggtcgccatcggcaaggtctggaaggatgaccactacctctgcgacacgcacacggcggtcgcctgggacgtggcgcagcagtacaagcaggcgaaccccgagcacaacgccgtcgtcgtgctctccactgcctctccttataaattccccgccgctgtgctcgagggcatcggcgaaaaggccgagggcgacgagttcgacgtgatggagcagctccacaaggtcacgggcgtgcccgtgccgaagaatcttgccgacctacgctcccgcgcggtgcgtcaccgcgacgtgatcgaccgcggcgagatgctcgactacgtgctcggcaaggccgcggcggaaaagtgataaaggagaataaacatgtatattacctgccttgatatggagggcgtgctcgtccccgaaatttggatcgaatttgcccgcgagagcggcattcccgagctgacgcgcaccacgcgcgacgagccggactacgacaagctgatgaaatggcgcctgggcgtgctccgcgagcacggcctgggactcaaggaaattcaagagactatcgcgcgcattgacccgctgccgggggcgaaagaattcctcgacaagctgagatctgagacgcaggccatcattttgagcgacacctttgaggaatttgcacaaccgctgatgaaaaaactcggctggccgaccattttctgcaactctctcgaggtggacgccgacggattcatcagcggcatcaagatgagatgcgagcattccaagcttacgaccgtgcgcggccttcagtccatcggctttgagaccatcgccagcggcgacagctacaacgacctcgaaatgatcgaagcgtccaaggcgggcttcctgttccgcacgacggaaaagatcaagcgcgactacccgcatctgcccgcttttgagggctacgacgagcttttagcggccatcgagcaggtcatccgcgcataagggaaaaacaaatatccggcttgaatgaaataatattcattcaaaatttgttcattttgacgattgacttttttctccaaaaaattattataatcaggcgaaacgcaggggaaattctcctgcaaggcaaacatttgtgaaaaatataggaggagaaaaatgtttagctttctgatctgcctcgcattgctgatcggcggctacttcgtttacggtggcatcgtcgaaaagactttcggccctgacgaccgtgaaacgccggccgtgaagatcaacgatggcgtggactacatggttctcccgcagtggaagctctttatgatccagcttctgaatattgcgggtctgggtcccatcttcggcgctctgagcggtgctctttggggtcctgtcgttttcctgtggatcaccttcggtaccatctttgccggtgcagtccatgactacttctccggtatgatgagcgagcgtaatgaaggcgcttccatctccgagatctccggtatctacctcggcggcgcaatgaagaacgtcatgcgcgtgttcagcgtggtgctgctcgtgatggtcggcaccgtgttcgctgtcggccccgccggcctcatccagctgctgtgcaccaagggcggcagcaccggcatctttgccagcaagctcttctggctggttctgatcttggtctactacttcatcgcaacgttcctgtccatcgacaagatcattggtaagatctaccccctgttcggcatctgcctcatcatcatggcactcggcgtggcgctcggtatcttcaccaagggctacgagatccccgagatctggaacaacttcgctaacctccacccgcaggccactccgatctggagctttatgttcatcaccgtcgcctgcggcgcgatctccggcttccatgccacgcagagccccctgatggctcgctgcatgaagagcgagaagcagggccacttcgtcttctacggcgcaatggtctctgagggtatcatcgctctgatctgggctgctgccggctgcgctctctacaccggcgaagagctcctcgctctcggcggcggcggttccaccgctgtttacgatgtctgctccaagaccatgggcggcgtgggcatcgcgctcgccatgctcggcgttatcgcctgccccatcacctccggcgatacggcgttccgttctgcccgtcttgttctggccgactggttccacatggagcagaagagctggaagaaccgtctgatcctctgcgtgcccgtcctcggcatcggcgcgatcctcggcatcggcaacgccctcggcaagatcgactacaccatcatttggcgttacttcagctggacgaaccagaccctcgccatgatcgttctgtgggccgcttccatgtacctcttctatgataagaagaactactggatcaccgctgttcccgctaccttcatgagcgctgtgtccgtgacgtacttcctgctgggcaacgagtgcctcggccagttcctcaacaccaagactgctgacggcgctaccgtttacaacactgcggtcgcttaccccgtcggtatcatcgccgctatcttgttccttggcatcttcctgtacaccatcaagaagcgccacaccgagcctcactacgagaccctgcacaagtaaaccattcttagagcggtgggagaatgctctcccaccgctttttcaaactttggaggagccttatgatttttgcacctgtgcgccttggcgaaatgagtctcaacgccgaagctgtcgccgcggacaagaagtcctgcaagcgtttcggcccctgcggcgtggggaaagaggcgctgtttttgaatagctattttatcgaccggcgctactatgtcgccttttcgtcggtgtgccgcgtcttcaagcgcgtggcgatgagccagggcggcttttcgggcaagggcgtgttcggcgcgatcccctatctcgtggtgcagtatgacggcgggaaggaaaagcagtgtaccttcaagcgcgaggaagacgtggacgcgatgctcgcctatatcggggaagtacatcccgagatcccgacgctgagcgtcggcggcgagcagcgcttggagcagaaggcaaaggaagaggctgcgcgctatctttccgagctgacgagcgacgcgcagagcgcgaaagaagagctggaaaaggcgcagaagttcctctccggttaccccgagctgacagatcagctctccaaggcggccagagccaagcgcgtgaaccagcatacgaaccccgcctaccgctgggtcgcgctggccattgtgctggcgggcgcagcggcgctggtgtacggcatcatctcgtggcgcaacggcggagatttcggcatgtattttgccctcttcggctttgcggcgatcttcttcttttccggcgcgcacgtgctgcccacggcgaagaacaacaaaaaggccgtcgcccgcgcctgggaagaggcacaggccaaccttgcccacgtcctgccggacgattttccgctgccggcgcgctatgcgcaccctgtcgtgctcacgcgcatgatccgcatcctgcgcgagggccgcgcccagagcgcagatgaggcgctcgaggtgctgaaatctgacctcaaggcgctcaacgccgacgtgcaggtctcgcaggaggaatacgacgaggtcgtcgcgatcaagtcgatgttcctgctgagcgattatcagtgagcgtatattgattcatttcgtcaaaaagcccgtggattttgcaaacccatgggcttttttctgtcgcctggcaagtgaatataagagcggtaaaagaaaaatgcttgcaaagcgatcgctttgcaagcattttttatcttcttttgctctttgccgtgggctttggcttggcccagccggatttgcgcttaaagtttttcggcttgtcagcgccgctgctcttcgggctctgcccgccgcggggcgcgtcgtttctgcggccgccggtctgagcggcggaggactttttaccgccgccggatttgccgtgcggcatcgcgcggtcatcgccgtacgggcggacaaggcactttggcccgtagccgatgaggtcctcgcgtccggcctttttgagcgcctcgatgacgagctttttcttgtcggggcggaaccactggagcagcgcgcgctgcaattccttgccgtgcggcgtcgtctcggcgaaaacaggtgtcatatcgcgcgggtcgatgccggtgtagtacatgcaggtcgagagcgtaccgggcgtggggtagaagtcctgcacctgctcgggtttgtgacccgtggagtgcagaaattccgcaagctgcacggcgtcttcgagcgtgcagccggggtgggacgacatgaggtagggaacgagatactgctcgcgcccgttcttttcattcacggagcggtacttgtcccagaatttttcaaacacgtcgaagtgcggctttcccatgtagtcgagcacgcccgccacgcagtgctcgggcgcgaccttgagctggccggagatgtggtacttgacgagctcggacagaaacggactgcccttgtcctcaagcagatagtcataccggatgcccgagcggacgaagaccttcttcacgccggggatcgcgcgaagacgacgcagcagctcgacatattccgagtggtcgggatcgagatttttgcaggggtagggagcgaggcagtttttattgcggcacatgccgcgcttcagctgatccttgcacgacggatggcggaagttggcgctcggaccgccgacgtcgtggacgtagcccttgaacttcgggtcgtgggtgaagccctcgacctcgcgcacgcaggattcaatcgagcgcgaggtgatcatgcgcccctgatggaacgccagcgagcagaagttgcatccgccgaagcacccgcggttgtgcgcgacggaaaagcgcacctcctcgatggcggcgacgccgccgagagcgtcgtacatcgggtgcacctcgcgcatgtaggggagctcggcgacctcgtcgagctcctcacgcgaaagcggcatcgcgggcggattgacgacgagcgtgtcgcgcccgtgcgcctgccagagcgctttgccgcggatggggtcgtgctcctcgtattcgagcttcgtcgcgagcgcgtaggcgtgcttgtccccgcacacctcttcatacgacgggcactcaacatggtcgaaggcgcagacttcgggcgtgcgcgtcacaaacgccgtgccgcgaatatctgtcaaggtatccgccttttcacccttggagagccggcgcgcaatctcgcgtgtggcgtattcgcccatgccgtaaacgagcaggtcggcctgcgcgtcgaaaatgagcgcgcggcggaccttatcgtcccagtagtcgtagtgcgcaaagcggcgcaggcttgcctccagtccgccgacgacgatggggatattgccgaaggcctcgcggcagcggttggcgtacacgatggtcgggcggtcaggccgaagacccatgcggctgccgggggagtagaggtcctgcgtgcggcgctttttcgccgccgtgtagtgcgcgaccatcgagtcgatgttgccgccgccgatcatcacgccgtagcgcggacggcccatcgcgcggaaagcgtccgcgctgtgccagtccggctgggcgagcacggccacgcggtagccctcggcctccagaacacgcgcgatgatcgctgtgccgaagctcgggtggtcgatatacgcgtccgccgtgacaacaaggaaatcatagtagtaccagccgcgctcgaccatctcgtccttcgagaccggcagaaaagccttttcgatcttctttttcttcattgttcgataacttcctgcaatctcttccagcaggattcctcatcgtattcaaaatttttctcaaaagtgacgctttccgcatcctcgcagacggggtggaagccccacttttccgcgcagtggaggccgaccaaattgctcttagcgatgcggccggtcgagaggatggagcagccatgcgagcgcgcgtaagagagagcctgaccgacgagcttttcgccgaggtcgcgcttctgcgcgtcctcctcgagccagaattcgccgatcgtgcccacgccgccgcggcaggattcgacgctgaccgcgccgatgatctcctcgccgtgcatcacgtcgaagtgcccgctttcgcccgaagcgcggtagtaaatgccgccctcgaagcccttcgggtcgttgacccacggctgcttgcggatggtggcgatgtcgtcgccgaggtgggacgcgtcgtcgcggaagacgacgttgaaattgccgttttcgtattcgagcttggcgacggcagtattttccgcgtggccggtcctgtcgatctcgtgcagcgtcatgccctgaagcgtgccgacgatgatgcgcatggccatgccgtgggaaaagacggcgaccgtgccgttcgggtgcgcctcggcgatatcggtgaggaccttgcgcatgcggtcgcgaacctcggcaaagctctcgcagccgtcgacgtgccatttctgcgaatcgttgctgaaattggcgagctgctcagggtcgatgcgctcaagctccgaccagggggtgtcctcccaatagccgacgtcgatctcgcgcagggcgcggacggtgcgcagcggcaggccgtgcgttttatagatggcaagcgccgtaatcatcgtgcggaagcggtcgcttgagtaaacggcgtcgaattttgtatcggcaaagcgctttgcgagcgcggcgatctgatggtagccgcggtcggtgatggtgctgttgtaccagccgtgcgcgcggcggtagaggttgccctcggcctcggcgtggcggatgagataaatcgtggtcatatggttctccttcatgctcattttttctcattttcattataggccgaaaagaggcattcagcaagggcgatttgcggcaaaaattgccgcgtatgacgcgatcttgtgtggacagactaagcgtgtgagcaaaggagtgatcgatatgtgtgataccgcattctggcgcggtatggctgccggtatggccgccggcgcgatcatcggcatgaccgtcgcagaaaagcgcaaagccatgaagacctgcgtgggccgcaccatgcagcagatgggtaccgccgtggacggcgcgctgagcgacttaatgcaccggtgaaataggcgcgagagcgcaaagaaagggcgggagctttagctcccgccctttctcattatttccttgctatcctgcttgcttttatccttagatgacgccgtactccttgaggagcttttcgatgtcggtgccttcgatcttgccgagggccttcttgacggccatcttttccatgaagcccatgtccatgtcggtggccttcttgccgtcgcgcagcttgacggtggcgttgagcagatcgcgcacatcatacacgctgccccagacctcgggcacgccgcggtcgacgttcagcagcgtatagacggcctccatgccggtgcgcatggaatactcggtggtgaagatcgtgtcgcgcggggtctcggcaaactggccgaggaaggcgaagttgacgctgccatcgggcacgacgttcgggcggtcgccataggcgcgcggcatgaagaacgcgtcgatatacggcatcatgacgggcacggtgttggcgctgttcgtcgcgagctcttcaatctggtcctcgggcacgccgatgtggtagagccactccatgcagatctccttgccggtgcactcgcgcatgggctttttgatataatcgcccggcttgtcggtgaagagggagtagacccagacgaggcagtggtccttgggctgcgtgcggaactgcggctggcggttgatggtccagctcatcagccaggaggaatccttcacggtgacgatgccgccggtgacgacatggccggtgaacgggtcgcgcttgcagatgttcttgatataggggatgatcttctgatcgagcgtctcgacggtggcgctcatccagttggtctgctcggggccatggcagaacttgtcgggatgaccgaaggacgggtcctgcgcggcgattttgcgccacatatcccagccgccgccctctttgagctcggtgttgtacgcggcgggctcgttctggctgcccatggaggagttttcgacgcagccgccgttcgtgatgaagacgaggtcgttttccgtgaggtcgatggcctccttcttgccgtcgcggatgacgtcgatgcgcttagccagcttgtgcttggggtcagagcagtcgaattcgacatttgcgacctgcacgccgtagtggaactgaacgttgtggctctcgaggtacttgaccatcgggaggatcatggactcatactggttgtacttggtgaagcgcagcgccgtgaagtcgggcagaccgccgatgtggtggatatagcgctggatatagagcttcatctcgagtgcgctgtgccagttttcaaaggcgaacatcgtgcgccagtagagccagaagttggaattcaggacctcgtcatcgaagaagtcggtgatcttcttgtcctgcagctgctcgttgggggtgaagaagagcttcatgatctccatcgcgcccttgtcggagatgtcgaacttgccgtcggtgtgcgcgtcctgaccgcggttgacggtcgcgcggcagagggagtagttggggtcttccttgttgagccagtagtactcgtcgagcacgctcacgccctccgtctcgatggaggggatggagcggaacagatcccacatgacctcgaaatggttgtccatctcgcggccgccgcgcatcacatagccaaggttctcaaacttgtagccgtcgcacgcgccgccgggcaaattgcccttttcgagcacgtgcacgtgctcacccttcatctggccgtcacgcacgaggtagcaggcggcagtcagcgcggcgaggccgctgccgacgatataggcggacttgttgtccacgccttcgggcttcttgggacgggcaaacgcttcatagttaccgctggaataatacataaatcatttctcctttcaaactgtctgtgaaaccgctgatccacgaaacacattcaaccttgggaatcaacggtatgttttcctttcgatggtgaaagcataccgcggttttgcgaaaagaacaatcagcagaaatcgggcggtgataagaaacttatcaccgcccgaaaagctgtaaaaagttttatcattctgccgcttttgatgaaagcagggaaaccgtcacgccttatcgatgcgcagccgctcgagcgcggcacggacattgccgtggatgacgagatcgagccggtcgacgagaagctggggatcgcccttcatgtcgtttttgatccagtcgagcatcaagccgacaaaagcgtacttgtagaccgtcgcgatgaaggccttgtcctcgtcacgcacgctcatgccctgcgcctgctcctcgaccacgccctcgagcagatcgtaggtgaccttgtagaggtaattttccacctgctcgcggctgacggagtggtagacgttcataatgaagggcttgttgtcctgcacggccttgaaaagctgcaaaaagccctgctgccacgtctcgtaggtcttgttgcccgcgagcgccttgctggcgtcctcctgacatgaccattcgacaaggtcgtaaatgtccttgaagtggtagtaaaacgtcatgcggttgatgccgcagtcctcggtaatatcgctgatggtgatcttgctcaggggcttttgcagcagcagatttttgagcgacgcctcgagcgcgcgtttggtcacctgtgacatggcggtctcctctttctatcaggaataatcggttattttcatcataccatggaaagcggcggaaatgggagaagtttttgtaaattctccgtagaatcgaaaaagaggacgcttatcgtcctctttttcaattcagtttatgctgtcctggaccgcttcttcaaaccgcacggtgagattcggattttcctctgcgctgtcattgagcacgcggcggaacgcgttggcgcgacggccgagcaagtcgtcgagcgcggtttcgccgcggacgatcagctccgtcggctcatgcaggtccgtcaggcagtcgtgcagggcgtcgagattgccgccgtaccacgcgggaaagtgaagaccctccgcgagcgcgcggtgcaggtcttcagcggtctcgcaggcggagacgtctaatacaaagcgcatggccgtcactcctctccgtacagcagttcaaaggtctcgtagtggtcttcggtgtagtaaatgaggccgtcgtttgagaagacgatgcgtttggccccgcgcgaatccgcgcccagcgtgtcgatgtcgcattcggcgtaggtacgcccatccgcctcgggcaggagaccttcgtagttgccgaaccggctgccgccgatgcatttgcccggcgcgtagggctcgagcgacccgcccggccagccgagggcctgggcatctttcttggtgatgaagttgtccggtaaatgtccgtaggtgtggatatagagcgcgacgtcgtccttggtcgtgtaggtaccgtcctcgtcgatttgaggggcggatgcatcgtcgtcgcttagcgtatcggcgtcttcggacggtgcgttctgcgcatcctgctgctcctgctgcggcaggctggaattgtcctgcaccggcgcatccgcgccacagccgacgagcgagaagagcatcacgagcgcgagcagccatgcggtcagttgtttcttcattgggaatcctcttgtggtgattttctccatcatagcacggctgcgggcaaaaatccagcacgcgcggcggttgactttgcgcgccgttgtgagtacgataggggaaacgaccggcaagtcggaatggatcaaaaagcaaaggagatagaaacaatgacgattgaagagcgcgccgagctggcggtggaaacatttgccgcgggaaagggcaactgcacccagtcggtgctgtgcgcgtgggaggataaaattcccgtcgaccacgaaatgctgatgaagctcggtgcaggctacggtgcgggcatgggctgcatgcaggccacctgcggcgcgctgatcggtgcggtgatggctgcgggcagcgtgacggacggcaagggcacgccgcgcacggcccgcagcatccttacgagctttcaggaaaagagcggcgcgacgatctgcaaggacttaaagggcgtggagaccggcaaggtcctctgtccctgcgcgcagtgcgttcgcaacgccgtcctcgccgcaggagagatgctgggggagtaaagggagaaaagcccagttcgctgagagcgctgagtaaaaaataaaaccaccatcgaaagatggtggttttatttggcgcagcaggagagattcgctcgcggtgttaccacaccgcgacacggaaagcggcgaaacgctgccagtggcagagaaagtgagccgctttcgaggaagtggcacgatcgacgggactgggcaagtcgcgtcgatcgtgatgccacgacggtgtaggcgggcactaaacgccccactggggcgttttttcgctttgctcatgccctgttcgaatctctggatacaaaaaagaacaccaccctgttgggtggtgttctttttggcgcagcaggagagattcgaactctcggtacgcttttgacgtacacacgatttccagtcgtgctcgttatgaccgcttcgatactgctgcgtatcggtgcgctcgacagcaaaaatgattataccaaaaatcacagcaaagtcaagcacaaattcgaaaaatgcgcgattttctgaacggcgccttcacttgcaatttttgccgccatcttttatactgacaaaaagaccctttggggagggagtatcatgagcagtagcatctatcgcgccgtgaacacgacgctcatttatatcgaatgcggcggcgaatacctgatgctgcaccgcacgaaaaaggagaacgactgcaatcgcgacaagtggatcggcatcggcggcaagtttgaagagggcgagagcccggaggagtgcgctctgcgcgaaacgaaggaggagaccggcctcaccctgacctcttaccgctatcgcggcatcgtgacattcgtgtcggacaagtgggagagcgagtacatgcaccttttcactgccgacggctttgagggaacgctcaaggactgcgatgagggcgagcttgcgtggatcaaaaagaaagatctgctggcgctgcccgcgtgggagggcgacaagatctttttgcgcctgctcgacgaaaacgtaccgtttttctcgctcaagctgcgttacgagggcgaaacgctcgcggaggcgaagctcaacgggaaagcgttggaggtgcggcatggataagctgctcgtgtcggcctgccttctcggcacgccctgccgctacgacggaaaaagtaaagcggacgcgcgcgtgcaggcgttggtgggaaaatatgaaattgttcctgtctgccccgaacagctcggcggtctcccgacgccgcgtgtgcccagcgaacggcggggcgagcgtgtcgtcacagcggatggccgcgatgtgacagaagcgtaccgccgcggtgcggaggcagctctcgcgctgtgccagcaaaacggctgcgaggctgccgtgctcaaggaaaagagcccgagctgcggctgcgggcagatttacgacggaactttttcccgccgcctgatcgcgggcgacggcgtgacagcggaggcgctcaaggcacacggtatcaccatatatggcgagagcgacgcggaaaagctgtgagtgttgacaatttctgcccgtgatattttatgcagtttaccgacaaaatttcagttgtctttgaaaagtgcagccgttatactatataaccagcattggactgatatcatacgtgtattgaatatgaccggcggatgaccggcggtcatcataataaaaaaggaggagcacaacatgaaattttccagcaaagttgaaaaatgcggcctgtctccgatgcgcaagttccacccgtatgcggtggcggcgaaggcacgcggcatcaacatctatcacctcaacatcggccagcctgacgtacagactcctcccgcgtttttcgaggcggtccgtcacttcgagcagccggtgctggcctacgcgccctcgcccggcatccccgagctgatcgacgcgatccagaactactacgacaagctcgacatgcacttcgacaagggcgagatctacgtcaccgccggcggcagcgaagcgcttcagatcgcgctgcagtgcattcttgacgacggcgacgaaattctcattcccgagccgttctaccccaactacaacacgatgacccgcacctgcggtgcatcgattcgcccgatcccgacctgcccggaggaggggtatcgctacgctgagcgcgagaagattgagtcgctcatcaacgagcacacgcgcgccatcatggtcacaaatcccggcaacccgaccggcgttgtgctgagccacgaggagatggagatgctcgtcgatgtcgcacaaaagcatgatctgttcctcatcggcgacgaggcgtaccgcgaattcgtctacagcggggagaagctccagtcgtttggcgagtttgccgacagggcgggtgacaacatcatcgtcatcgacacggtctccaagcgcttttccgcctgcggcgcgcgtatcggctgcctgatctccaagaataaggagttcatgaaccacgcgatgaaatactgccaagcaagactttcggtcgcgacgctcgaccagatcgcgtctgccgcgctctacaccgtcggccccgagtattttgccgccgtgcgcgacgagtacaagaagcgccgcgacacgctctgccgcaagctcggcgagatccccggcgtggtgttcgacgtgccgggtggcgcgttctacgtgatggccgcgctgccggtcgacgatgccgataagttccagcaatggctgctcgaggaattcagcgacaacggcgagaccgtgatgatggctccgggaggctcgatgtacgcgacgcccgggaagggcaaaaacgaagtccgcatggcctacgtcctcgaaagcgacaagctcgagcgcgccatggatatcctcaaaaaggccatcgaggtctataacgccagataaaaaggagaagatacctatgatccgtcatatcgtaatgtggaagttccgcgagggcaccgaggaaaaggccaacgagtttctgacgaagctcgccgcgctcgacggcgtgatcccgcagctcaaaaagtgcgaagtcgcaaagaatatcggcaaggacaactacgacgccgtgctcgtctccgagtttgagacgatggatgacctgaacgcctacaaggtcgatccccgccacgttgccgtgagcgatatctgcaagtccatccgcgccgaccgtgtggccgtagactacgaattttaatcaaaaacaaagagcgccgaaaggcgctctttgtttttgaaaaggatctcgctccgcggcagcgcacgcaccgtaggcgcgcacgtttgcggagcgagaggagttttttctgacgcgcatgtcgtcagaaaaaacgatctcaatttttttgcgcccgcgggcgcaaaatggttttgattattttttgtcgcgacctgcgcgtgaaaaaaatactttgcgcgaagcgtgtgtcgcagccaccctccgggtggcaaggcacaaagcgcagcgaaaatttttcaaaaaagaggccatttatggcctcttttttgagctgcaaccgctggttgctaacttttcaaccccgcttggtggactttttgcacgccttttggtaagctgaacgcagaaaatctgcaaaggagaaccccatcacatgacacttggagagaacatcgtgcgcctgcgcacacagaaaaactggtcgcagggcgaccttgccgacgcgctggacatctcgcgccagagcgtatccaaatgggagaccgacgcctccatccccgagcttgacaagctattaaagctctccgagctcttcggtgtgacgcttgacgagctggtgcgcggcgaggacgcgccgaagacggaaacagccgcgcccgcggcacaggcagtacccgcctctttcacgccgcagacttcgtccgagcaggaaaagcgtcacaccattgcgggtacgattttattgtgtatcggcgcggttcttctgctcacctgcctgatactcgccggcgatctgctggcggggctgatttacggactgccgtttttcctctgcggcatcatctgctttacggtgaagtatcgcacgggcctgtggtgcggctgggcggcctatctctgtattgatctctacctccgctttgcgacgggcctttcgtggacgactgcctttatgacgcacctctggacggcgcagatgaactatgcgcgccttgcgatctcgtgggtgcagttcttcggcatgcttgtgatgatcgtctgcacggcgcgctcctaccgaatgctcaggctgcccgcgacgaaaaaagagggcacatggctcattgccggttggctcatcgcgctcgttgtgctgccgcttctgatgagctacggtatgatgccgctgctgctcgacgatctcggcaattacagcaacatttcgccgtacttccttctgaatgtcgtctacagctacgcgcgccttgcgctcatcaatgttcttctggtgcgttcactcgccgtatggcgcttgaagcgggaagagaagaaagcggaaaagtgaatcgaaatgagaaaaagcggaccgcactgcggtccgcttttttgatgcaaatatgccttacttcttgcttttctccagcgcggcaagcttgaggcagcagcagaagacggccatcgcctgctcaagctcctcgaccggcggcagcgacggggcgacgcggatgttgctgtcaagagggtcgtgtccatacggataggtcgcgcccgcgctcgtcatcacgacgccagcctccttggccagcgccagcgtgcgcttggcaaggccaggggccgtgtttacggagacgaaatagccgcccttgggcgtgtgccagctcgcaatgccgagcggtgcgatctcgcgctcgagcgtttcgacgaccatgtcgaacttcggtttcatgatcttggcgtgctctttcatcagcgcgagggtgtgctctttgttctggagatacttgacgtggcgcagctggttcatcttgtcgaagctgatggcctgaatgccgatgagcttggtcatgtactccatgttggcctcgctgcacgcaaagcacgcaatgcccgcgccagggagcgtcaccttgctcgtggaagcgaactcgaagaccatgtcggcgttgccgtacttctcgcactcgctcagaatatccttgaacgggacgaactcgccgtcaaactcgtggatgcagtaggcgttgtcccacatgagcaggaagtcgggagccgcgggcttcatcttcgcaatgcgctcgatggtctcgtcggagtagatgatgccgtcggggttcgagtacttcggcacgttccacatgcccctgacgctcgggtccttgatgaggttttcgacaatgtccatgtcggggccgctttcggtcatcgggatggtgatgagctcaaagccgaagctctcggtcaccttgaagtggcggtcatagcccggcgcggggcagagccacttgacgctctcttccttgcaccacggcttttcgctgtgcagcaggccgtgggtgtaggccttggagaccgtgtcgtacatgagctggaggctcgaattgccgccggcgaagacctgagaggtcttgcagccgaggatatcggcgaacagcttacgcgcgctctcaagacccttgagctcgccgtagttgcgggcgtccacgccgctgtccacgcactcctcggcgctggtcagcgcggtcaggatgccgctgacaaggtcgagctgctgcttgctcggcttgccgcgcgccatgttgagcttgaggcccttggccttccagctctcgtattcggcggacaccttgtcgtattcctgctgccactcggcagcggaaagagccatataatccatgatgattctcctttacaggtaatttatccgattaaagtaactgcattatagcacagggaaaaatcaggcgcaagtgtccacatgtaacaatcatttgttttgcctgcggcaacaagttgactcattgaacagattgtaccgcccctcgccgcaatagagaggggcgctgctttttggcgaaagcgggaaagaaaacgcgtcagcactaaacaaagtgctgacagtgcgtccaaatcaggcaaaaagcaaggccgcggaaagcgatgtgctttccgcggccttgatcgtttttatagaattggtcttgtcacagctcggtaaaggtgcgaatttcatcgagctgggcgtaacgccgcgcgtgtgttgtgctcaccttgccggcgcagacggggcagccgcattgctgcgcgccggtgcgcggatagacgacggatttccacacgtgtcccatggagcactgccaccagacctttttgttgctgccgggtgtgaccatctccggcgtcagcgcgccgttgagcgacggatgccactgcgaagcaatgtcggggcagagcgtcttgagatcattgaagcccttgagcaccttgcgtcccgcgcagtagggacatccggtcttgcgctgcgtgcgcgaggcgaccgtggcgcggtaggaatgccccagctcgcagcgccaccaagcgggacggttggaactgacggcgacatcgctgggcttcaatcgcccgtttttgcgcttgtcccactgtgcggcaatctcgggctggaggtgggcgaggtcattttcgcccgtgacgatcgtcttgcccgcgcacacggggcatccgtgcccccacgccgtgcgcgaggcgacgggcgactgccacgagtgccccaccggacagcgccaccagatgcggatcttcgagcccgtggagacgtcgcgcggcgaaagtgggccgtttttctcacggtcccactgcgcggccacgtcgggatagagcgtttccaaatcgttgaagccgggcaggacctttcgccccgtacagtacgggcagccgctcccctcggagcgcacatgcaccgtcgtctgccacgaatggccgttttcacacgtccaccagacttttttcttgctgccgtaggaaacggtgtccggcgtgagcggaaaattgcgcgattcatcccattctttcagtaagtttgtcctttcgtgcagcatgcagaactcataaaatgtttgtcgcatgttcattcccgccctcttttcggcaaaaaggtttcccgcctgtaccttgctttcagagagggccgggcggtgcaggaagggcgctgcccttccgaatgatttgcaaccggctgtcataaccgcacacggcggccttagacccctctggctttgcgtccctgcttttcagcaggtttgccaaacattgcttgatttgcttgtcagatcagtacaggcgctttcgcgccggaaacggggaagaaaaaacttccgttttgacagaatcaatgaaaaaagattcgccgatcctgtcgtatctgtattctatcacgaactttccgtaaaaacaaggcgggtgacaagacagaattcgaaaaaggtatgtaaaatttgaaaaaattcgaaagaaattagcggaatgttagcattttcataccgcttctctatgctttcgacgtgatggagaggactgaaaccgcgcgcggcgatgcgaccgcaaccgcgctttcttgacatcttccgccgtttcggtatgatagagccatctcgttttttggaggcgactatgcattcagtgacaactaagaaggccgcgctcgcggcgcttctcgttctggcggcgctcctttccatcttcgcggtggggaagagagcgtccgaccccgcgtaccatcaagcgtccatcgacgcgctcgcggaaaatcaggagacggtgcttgagctgacggcggcgtcgaccgccgcgtccgcggccatcacgctcctgccgggcgacaccgcgacgcccatcgccgaaaagctcgccgacctgagcggctatttcctcatcgtgctctgcgccatctttctagaaaagtatctgctgacgatcacatcctacgtatcgttcacgatcctgatccccgcagcctgcgcgctcggcatcgctgcgctcttttccgaaaagctgcgcgccgcgctgggaaagctcgcgtggcatttgctgctcttcgcgctcgccatcgcgtttgccattcccgcgggtgtcaaagtctcgagcatgatcgaggacacataccgcgcctcgatcgaagagaccatcgcaaacgccgagcagacgaccgaggatatccagtccgccacctcgggcgagacggacgagagcgaaaaaagcggcctttccggcctcttttccaaggtgactgagggcatcaccggagcggcgaccgccgcggtcgggcagctcaaaacggtcctgaaccgctttatcgaggccctcgccgtcatgctcgtcacgtcgtgtctgatcccgattttagtgctgctgttttttgcctggctcgtcaaactgatgctcggcatcgacttaccgccgctgcgcgcaaagctcggcgacggtaaggtgcacagcacgagcggcgcgccgcggatatgaccacatggccatcgtaaaaaatatacgataacttaaaagtgcggcgagcgcagcgatgccgctttggggaggcagcaaggttggcaaaatctagcgacggcaggggattctaccaagactgcattcagatcagggagcgacagcgaagatagaaaaaagtcaaatcgtttagaaccatcacccggcaggtacccgattccgcaggctgagcagctcttcaagcctcaaaaccgcaatgctggggggcgagggggttcccctcatccttcccttgggattcaaaagggggcattctcttcgagaagagaatgccccctttattcgctcccccctgcgggttagcaggagaaaactccgcagcgctgcgcgcgctgctgattcaccttacctccgcaaatcgcgtcgtcagaacgacacgacttcctgcgcgggcttcgacgtggtggtgatgcgctcgacgtacagcacggggccctcgccctcataggcgtcgaggtgctcctttttgaccgtggcagtgatatcgacccagtcgcgattcttgtaggccttcaggctgtcgcccttggcgacgatgccgacgaactggatgtcgttttcgcagcaggtcatcacgaagcggccggggcagtggatgcccgggaacttcttcgagtggcacatgataagcttcatgtggacctttttgccatcccagcggtcgggatggtccatcgcgtcgacgtaccacacgccgtagtcgtcgtcgggaatgtcgatgaggtcgggcgtcatgtcgaacgggcactcgtcgccggtcaggtaatcctcgctgttgccgtcgttgtcctcaaggtagatgtccgcgcggcggttgaccatgcgcagattgcgcgcgcgcaggctctctttgagcttgttgtcgcagcggttgaagacgatcatgtccgcgttcgtgatcttttccatcatgagctgccccatgttcttgacgaacagctcgaacgtcggcgcctgcacgaacgtcatgatttgatagagcacccagttggcgggcagcacctcgcgatacagcttttccatctgccacatgccgttgtactcgatgagcacctgcttagggtggtgtttcttttcgagctccttgcagaaggcgagcgtcaactcctcttcgtcgtccaccgtgacgacggtgacgttgtcgagcgccttcttctcgtattcttcgtcgccctcttcgcagcaaatgagaagcgtcttgtcctcgcgggcaaagccgtcctccaaaatgccgttgataaagctcgttttgccggaatcgaggaatccggcgaccagataaacaggaatatccatgccttacactccaaacagttctgcaagctcgtgctctttgagctccgcgccgataacgcacagacggcccgtatagtcgggatggcccgcgcggacctcatgctcttcgggcacgtagtcgaattcgagccagccgtcctcgccgttcacgatgcccttggcacgcaggatgtggccgtagtcgccgctgtccagcttgtggagcatgtcctcaagcgcttccttgctgaacttcttcggcgtctccttgccccaggaggagaagacatcgtcggcgtggtgatgatggtgatggtggcactcgcactcaggatcgtcgcactcctcgccgtcgtggtgatggtggtgatgctcgtgctcgtggtcatgctcatcctcatcgtggtcatggtgatgctcgtgttcatgctcatggtcgtgctcgtcatgctcatcgtgatgatggtgatgctcatgctcgtgctcggcctcttcgatctcgtgctcgcggcgcatcttttcaagaagctcgtcgctcaacgacaccctttcgatggcggagaggatggtcttgccgtccagctcgtcccacggagtcgtcagaatggcggcgtcggggttcttctcgcgcagcatcgcggcggcagcctcgagcttttcctgcgagagcttctgcgtgcgggaaagaatgatcgtgccggcggcctcgatctggttgttgtagaattcgccgaagttcttcatatagaccttgaccttgctggcgtcggccacggtgacatagctgttgagcttgagctcggggcactcgtccaccgtgcgctgcacggcgacgatgacgtcagagagcttgccgacgccgctcggctcaatgaggatgcggtcggggtggaactgcgccacgacctctttgagcgccttgttgaagtcaccgacgagggagcagcagatgcagcccgcagacatctcggagatctcgatgccggactccttgagaaagccgccgtcgatgttgatctcgccgaattcgttctcgatcagcacgagcttttcgccgctgtaggcttccgcgatcagctttttgatgagcgtggtcttgccggcgcccagaaagccggagaaaatgtcaattttcgtcataagaaatacgcttccttcttttttattgatttccaaacctgtattataagcagaatttgtgaacgattcaagtctttttccgcgtgaaatgcgcctttttcccgctcacaggtccataccgggcagcggcacgcggtgaggcaggatcacatgcccaaagcagatgaagcgctttccgctctcagggccgcagatgacgtccgcgccgctgcggtcccgccccagagagaagaggtacgaaacgccgagcgggtcgcggtaatactgcttgcagagcatgtcgcccccgacgcagaagatgcccacgtcgcccgcatgcagcgggtcgtgattgaggtaggcgacgctgccgccgtgcagcacgggttctaaactgtcgtcgcggatgcgcacggcgaattccgctcccggcggcacatcgccgtggtcgacgatgtagtcaaaatcctcacctagcacgggggcggcgtagcccgctgcctcgatcgagcggtagagcgggatgcggcgcggcgcgcccacaccgtcctgtctcgcgtgcatcgtgcacagggcgctgacgaggctgcctaccgtctcgcgctcgagcggcgagagcgagcggcacttttcaatcaaatcctgctctgcgcgcgagcagacgaagctgcctgagcggaacgaatcgcggtaaaggtagttcgggtcgatctcaagcgcatcgaacagccggagcagcacctcctccttcggcgagctgacgccgttttcatagttgctgatggcagagggcgaaacgccaagctcctccgccagcgccgcgcgcgagagatgaagctcctcacgccgcagacgcatttgtttgccaaaactcatcaaaattcccccagaaaacgcaggctgcgacaagatttgactgtattctatcgcagaagcttgtatctgtcaatcaattataacaagaatcttgtgaatttattcttgagatagcaagattcttgtgatatcttgattttgctaacaagttctttgtacttgatggcgtgccgcggcgagcgttctcctcagtttgcccgcggcgcacgccgccgataccggtacggcggctgatccccgcagcagaaaaagaaaacgcgccgccctgaaaaggacggacgcgaaaaaaatagagagaaagaaaatatcgagccagtctaagggcagctcgatatttttcgtttcatgcaacaaaaaagaacgagctgactttcctcaactcgttcttggtgggggaaggtggattcgaaccaccgaagtcactgacaacagatttacagtctgccccctttggccactcgggaattcccccatctgaaattgtttgcttgtcggtggagctggtagacggattcgaacccccgacctgctgattacaaatcagctgctctaccagctgagctataccagcatctcagcaacgaacaagttgtatattaccagacttcgattcgtttgtcaacagggaatttgaaaaaaggaggaattttgttgtacgcaggaaaaagacaccatgattcggtgcacgcggtctgctcactctgcgcgcaggacatttacgcgggagaaacgctgtggtaccgaaacggcgtgaccgtctgcgcggactgctttccgcgctttgcgcgcgaagcgctctggtcgtttgaatacatattaggggaggcgagcacgttatgacgctgtatcagatgtcgtttgtctaccgcgaggatgcgctgcgcttccgcatgcgcatcacggtcctgcgcgagcaggccaaggccgcgccgacgaaggaggaacgcgagcgactcaagcggcgcattttggagctccagcagcttcagcgccagtcgcgcgagctggccgagctgacgcggcactattacgaaaggggttattaccgcaatgaaaagtacaccttatagtatgcgcaacaatgaagtttacggcgatatgaccgcctggatcgccgcacacgcgggcgacaacgagagcgacctcatgcgcctcaagcgcaatctgcgccttgcccgcgaggaggagcttaccgcccgccagcgcgagctgctgcgcctgcggtatgaggaaaacatgaccgtcacggagatcgccgcggccatcgggcgggacaagtccacggtgtcgcgcacgctctcccgcgcgcggagaaggctttacaagtgcctccgctatgggctataatcaaaaggtaacaagcgaataagacccgcacgggtacatagaataatggtcagtgcggagaaaagtgagggcaagagctatgctgcacaaagcgctgcaaaacaaatgggcgcgcgtcctgatcgcggttttcgcaacattcctctacgcgctgggcgtgaaccttttcgtcgtaccgatgggcctctactccggcggcgtagtcggattgagccagatcatccgaacactgctcgcgcaggctgtcgagctgcccgcaggggtggacatcgccggtatcttgtattttctcatcaatattccggtgctgtatctcgcgtggcgcgacctcgggcgcgcgtttttgatccgcacgctgatctgcgtgggcgcgtcgtcgctctttttgagcgtgatacaatctcccgctgtgccgatcttggacgatcctctcgcctcgtgcctcgtcggcggcattctgtgcggctttgccctcggcttggctctgacctgcggctgctcgaccggcgggctcgacgttgtcggactgtgcctcacaaagcgcggcagccgcttcaccgtcggacgtttttcgctgggcttcaacatcgtgctctacgtcgcctgcgcactgctcttcgacatccagacggccatctactccgtcatctacacggtgttctgctcgcttttcatcgaccgcgggcaccagcagaacatcaatgtgcaggtgctcatcttcacaagggacgcagaccccgagctcccgcgcagcatcatgtcgcgccttggccgcggcgtgacgtactgggagggcaagggcgcatatacagagagcgacatgcgcgttttgtgcgtctgcgtctcgaagtttgaggtcgcggagctgcaggagaccgtgcgcgagctcgattcccacgcctttttcatcgtgcaggagggcgtgcgcatcggcggcaattttctcagaaagatctcgtaaatcctttcggttttcccgcgaagacgctttgcgcagcagagcgtcttctttttgtttatttaactattttgaaaaatcatccatgttttctaaaacattcaaggatgttttattgcgtttttctatcaatcgtgatagcattacctcaatcttttattgtgccgcagcagtgtcctttccccgaagacatgcggcatgaaaaagtcccgcagcgaataaacaatcatcaaaccccaatgagatgtggagggatcttttcatgtttgaccagtattttgaaaaattcgatttagcccccgagatcaccgcggcactcaaaaagtgcaagtgcatcgcctatgccgagacgaaggcggagctcgaggagatggcctacggccccacgcatacctcccgctacgacgtggtctaccccatcgagggcaatggcacggtcaaggaagcggaggtcgtgcgctgcaagaacggctgcgtcgtcaacttcatggaagactacatgcgccgccgcgacccgaacagtatggccatcggcgacgatctgccctccgacaaaccgcgcttcaaggaccgctttggctacgagttttcgtcccttcgtcaggagacgctcgactggctctccacgcagcaggtcatcatgctgccgttttccgccggtccgcgcggccacggctatccgagcctgatgatctgcccgctcaacgccgcgttctttgcgctgtcgctggcgaacatgcagggctttacgagcattgtcgatgtgcctgagcactataagccccgcgccatcatctttgtcgcgccgccgttccgccacacgcactttgacggcaagcaggtcgtcgtgcacaaccgctccaaggagatgcacgaggtctgggcctataacctctatccgggccccagcgccaagaagggcgttttctcgctgctgctcgacatcggcgagcaggagggctgggtctgctgccacacaagcgcggccatggtcgagacgccgtatgagtgcgaggtcgtgttcatgcacgagggcgcgtccggcggcggcaagagcgaaatgctcgaggacttccaccgcgaagaggacgaccgcctgctcatcggtacgcatacggtcacgggcgaaaaatattacatgacgcttggcgagagctgcaagattcaccccattgccgatgatatggcctgcgcgctcaaaagcttccaggatcccgagagcggcaagctgcgcatcctcgatgccgaggacggctggttcctgcgtatggacggcatgaatgcctacggtaacagcccactttatgagcgcatctgtatccatccgagcgagccgctggtcttcttcaacatggacggcacgcccggtgcgacctgcctcatctgggagcatgtgatcgagtcgaacggcaagccctgctccaacccgcgcgtcatcttgccgcgcaagatggttgacaacatcgtgcctgataccgagcccgtcgaggtcgacgtgcgcagcttcggtgtgcgcatgccgccctctactgcgaaagacccgaactacggcgtcatgggcatgctgcaggtcgtgccgcagtccattgcctggctgtggagactcatctccccgcgcggcttcaagaacccgtccatcgccgatacgaacgccggcagcggcctgaaggccgagggcgtcggctcctactggccgttcgccacgggcctcaaggtcacgcaggcgaatctgctgctcgagcagatcatgtccgcgcccaagacgacgaatgtgctgatcccgaaccagcacatcggcgcttatcatgttggattcatgggcgagtggctctcgcgcgaatacctcgcgcgccacaacggttttgtgcgcgaaaagcatctggtccccgcgcgctgcccgctgttcggctacgcgctcgatgaaatgaagctcgacggccagttcatccgtcagacgttcctgcgccccgagacgcagtccaagctcggcaacgcgggctacgacgccggcgccaagatcctgaccgacttcttcaaagagcagctccagcagttcatctccgacgatctcgacccgctgggccgcgagattatcgattgctgcctgcatgacggcacgctggacgattatctccagctcacgccgatgaagctgaagtaatttcagaacttttttcagaaaattcccccacctgacgtggggaacgcgggaaagggggccattctctcacgtgagagaatgctccctttcttcgcacaagtgcgagggggtatgccgcctgcgggcggcgggggcaaaggggccgttctctttcgcaaaagagaacggcccctttggaaccccaagagaaagacttttgattggcagtttcgggctcgaatgacttttgtgcttccggaatgggaatgcctgcgcgcggcgttgccgcgttagcgttgctatacgacttgatgtgctcctatcatccgctgccgctctgccagtctcgtagtggtgtagccgaatctccgtctaccggaacactcctcaatgcggcgagcgccagcaatgccgcattcggcacgcagtctgccgccaagcaatcgtcactcgcgcctcacgatagtaaggcgcggttgcaaaacggttacgaatcgcagaggttcatggcgaagccatgtacaccgcacccgattgcgcagcgcatgcagtcattcaagcgcccgactgccaatgtagggggtcgaggggggcgcccctcgtccttctctgggggatttaaagggggtattctcttcgagaagagaataccccctttgccccgcgccccacggcaggtggggacccccatacagcgcccgcggcgctgcaaaactcacgcacctctgtcaggtgcgaaaaaaggagcattctatggaacatacaatgaaagtcattgccagaatccactctgactttccggaaaaattcggcatcccgcgccagagcgggctcgtccccacgcttcgcgcgaagatcgtcttcgagccggagtaccggaatcccgacgcgctgcgcggcatcgagggcttttcgcacctgtggctcatctggcagttctccgccgccatgcgcgacacatggtcgccgacggtgcgcccgccgcgccttggcggcaacgagcgcgtgggcgtttttgcgacgcgctcgccgttccggccgaacgccatcggactttcctgcgtgaagctcgaaagcgtgcagcatgaggatggcttcggtgacgttttgatcgtctcgggcgcagatttgatggacggcacgccgatctatgacatcaagccctaccttccgtatgccgatgcgcatcccgaggcgctgggcggctttgccccgtcgccgaagaagacgatcgaagtcaaaagcccgccggagctcctgcaaaagctgccggaggggcagcgcgaggcgctgctcggtgtgcttgcgcaggacccgcgcccgcagtaccagaacgaccccgagcgcgtgtatggtatgagctttggcggctgggacgttaagttccgcgtaaaggacggcgtgctgactgttttatctttagcggaaactgaacatcaataaaaacgctgttaagggaaaaactcttcgcgttaagccaatgctaagagggcttccaaacggttgatatgcaaattctgcgcgctataatagcgccagaatacataaaaggagcgtatccgccgatgcaagtttccagcgcatttgttgttatcatgggtatgggcgtcacattcgtgggccttacctgcatcatcttcctgacgatcctgatgggcaagatcctctcgaagcctgaggctcccaagcccgccgctgcagctgccgcgccggcagcgcccgccgttcccgctgacggtctgaccgacgaggtcaaggtcgccatcatggcggcgatcgcccagcagcccggcttcaacatggcgaatgtgacgaatgtcagcattcgcaagatttaattttgaattccacttcttcctttatcagcgaaagggacggcatcgcgccgtcctttttgctaccatgaaaaaaatattcgatttagcacaaaattagcaggctgtatgctataatggggacggaaagcatgcggagtctttctccgcgccaatgatcaagcgagagaaggcggcgacatggcaaaaatccccgaaaaaatgcgttggatctacgaccttttgctgacggcggcgatcctggctacggcgacggtgctctgcacgctgctgcgaaggatcgacgacggcagcggctacgtgaacctcatcttcgtgctggcggtcgcgaccatctcacgctggacggaaggctatttctgggggatattcagcgctgtctccggtgtgctgttcgtcaactacgtgtttacatatccctactgggaattcaacttcacgatcaccggctacccgttcaccttccttgcgatgctgacggtgtccatgatgatcagtgcgatgaacacgcagatcaaaaagcaggagcgactgcgcatcgaaacggagaaggaagccgtgcgcgccaatctcctgcgcgcgatgtcgcacgatatccgcacgccgctgacgagcatcgtcggcaacaccgccgcgatccttgaaaacgaggattcgttttctcccgagcagaagcgccgccttttggaggatgtgaatgaggacgcgcagtggctcatccgcatggtcgaaaatcttttgtccatcacgcgcatgagcggcggacaggcaaagatcgaaaaggactgtgaggcagccgaggagatcgtcggcgtctcggtcagcaagttcaccaagcgattcccggcgatccatgtctcaatcgaggtgccggacgaggtgctgatggtgccgatggacgcgacgctcatccgtcaggtcattatgaatctgctggaaaacgccgccatccacggcggaaacgtcacgcagatccgcgtctgcctctcacgcgaggggacgaacgcctgctttgccatcagtgacaacggcgtcggcatcccgaaggagaagctctcgacgatctttaacggcgggctttccggcgtgtcgcacaacaactttgatatgaagaaaaacatgggcatcggcctttctgtgtgctataccatcgtcatggcgcacggcggcacgatgaccgcagaaaatttagaatcgggcggagcgtgcttccgcttctatctgccgctggaggagggcatcaacagtgaaattgaaggataaagtgctcgtggtggaagacgagcagaacatcagcaactttatttcgacggttctcaccgcgaacgacttcgacgtgctggtggcgcagacgggcgccgaggcgatctcaatgatcacctcgcactgccctgatctcatcattcttgatctgggacttcccgatatggacgggatgaacatcctcaaggaggtccgctcgtggtcgagcctgccgatcattgttgtttcggcgcgcacgcacgaacatgacaaggtcatggcgctcgacctcggcgcggacgactacatcgaaaagccgttcggcacgagcgagctgctcgcgcgcatccgcacggccatccgtcacacgcgtacgccgctcgacaacaacgagatcgcgcagtcgggcaagttcaccgtcaaggacctgaccatcgactatgacaagcaccacgtgctcatcggcgatcaggatgtgcacctgacgctcaacgagttcaagatcgtggcgctgctcggcaagtacgctggcaaggtgctgacgtatgactatctcatcaagcagatctgggggccgaaggccaaggccgacaatcagattttgcgcgtgaatatggcgaacatccgccgcaagatcgagaagaatcccgcctcgcccgagtatatcttcaccgagatcggcgtgggctaccggatgctcgaaaacgacgcatgatgatagagccgttcgcggctttatgataccagggcgcgtgcgcgccccacacgatcacgcagacggctcctgccatttggggatggcaggggtcatttgcgcattttgtacttttatgaaaaaggtgtcggactgaaacagtgaacgtttcagcccgacacctttcttttttgcgtgttttcatgcagcaaaatctttttgcttgcttataaacacgccgtattgtgccgcagcggatgttcgactgtcatagttatgctgacttttgtgtatatttttaccaaatcgttttccgttctatttcacctctttattcagcactacaatcttgaaatgaattgttattcttactattgacatttaacaaacataaatatacaatcagcgtcacagtcagtcctacgaaggaggcaaccgcagcacatgaacatttgggaaattgcaacgaattattatcaatacttcctgcgagggacgcgaacgaccatcctcatctctctactcaccgtgttctgcggctcgatcctcggctgcctgatcgctttcatgcggctatccaagtttaagccgctggaaaagttcgccagcatctatatcaccgtcatccgcggtacgccgatattctttgagaagtttaccactgaaaagcagttttgcatcatgttcttctttgtcaacatattcatatacagacacatctaacaaattacccataacagagatttttgttgttgtcttgtaattgaagttgacgattgcatggatttcatcatcactcttgaaatattctttgtaataatccaatgcgtagtcctgcatttcaatgttttctgcaatggtagcaattcgccaatttcctgttacatcattacgaacattcgataccacaaaggaaatatagtctctaacatcatacgagccattgagttttccatagctgacaggtcaatcaatgttgtgggcaattctaacaccataacacgaataccgttgttcttaaagaatcgtaattcctttagcgtggcatccttgtttcgtcctaatcggtcaagttctgtgacgatcagcacatcaccactttcaagaatttcatctttcagcattgtgtagcgtggtcggttgaagttctttcctgtctgttggtctgtgtagaccttgcccttatacagagaaattgcattatcagcacaatacttggtgagttctgcaattcctctgtctaagtgctggtcctttgtgcttgtcctgtgataagcaacatatttcattccgacacccccttatcgtataaatcacagtttccaccatcaataacggtagagggcttttcttcgtacatcgactacaccgcagctctcgcattcgccgcggcgaacgatgacctgacggtcaaggacatcggcatcgagagcgacagcgagggccagtgcatcggcgtgcagaagggcaacgaggactttgtcgcctacctgaacgaaaagatcgccgagatgcaggagcagggcctcatcgaccagtacgtcgccgaagcccaaacgctggcgggcatcgagtaaagcccgtcccccttgcatgatatgaacagcaccagcataccctctaccaagagaattggggaggatatgctgatgctgtttcattttgaccgcaggaagaagtctgaaaaggagaagaagccgccgcgctttctggtgctccggcgcaaatggctgacgctgggcgcggcggtgctggccgccgcggcgatctttgccgccgtcaattatcccgccgccgtcagtgcgtcggccgcggcgcgccagctgccgatctactgtgtccagcgcgaccagaaggtgtgctccatctcgttcgacgcggcgtggggcgcggacaacacgcagaagatcctcgacgtgctcaaggagtacggagtcacctgtaccttttttgtcgtgggcaactgggcggatcagtatcccgaacaggccaaggccatcgtggacagcggcaatgagctcatgaaccactccaacgcgcatgatcattataattccctcaccgccgaccagatcatcgcagacgtgaacacctgcaacgataagatcgaggcgttgaccggcgtccgcccgacgctcatccgctgcccgttcggcgagtatgacgaccacgtcatctccaccatccgctcgataggcatggagccgatccagtgggacgtggattccctcgactggaagggcatttcggcgggtgagatcacgaagcgtgtgacgggcaaggtgcagagcgggtcgatcgtgctgttccacaatgcgggcgagcacacgcctgaggcgctgccggatatcctcgactacctgctcgccgaggggtataagatcgtaccgatttcgaagatcttgctcacgtgcgactataccatcgaccacgaaggtcggcagtgtccggcagaggcagcacagtgagcgcggtgtacttaatagtatgtgaaaacgaaaaagaaggggagttctcttgcaaagagaactccccttctttacttgattttctgggttgcaggctcgtgcctttacgcgccgatgataatcgggacaaacgccgcgcaggtgatgcacatcagcatgcccgtgcagaacgagtaggccatggtctcgggattgcagtacttttcgacgagcggcaggcacaggtcggtcgacgctgtgccgggcagcgtgatggcttcgatatagccgatcttgctcgcaacgagcggcaggaagatgagtcccatcgtctcgcgcagcacattgtgcagaaacgagaccgcgcccgcgaccgcgtgccccgagccggagatgacgctcggcgccatcgtgtaccagccgaagcccgcgctgatggcgagcccctcgcgcagcgtcataggggtgagaaacgcatagacaacgcctgcgagcagcgagccaatcacggagaaaatgggcacgaggacaacgcctagccctgccccgcgcagaacgcgaacgatgctgccgtcaagtcccatgctgaagcccaccgagccgagcatgatgcaaagccctatgacgagcagggtgctggagacttcttcaaaacgctcgggcgagatgagctgcgggaggacaaaatagcccaacagcatcccgcagatgaccatgaggcaaatgatgaccgaggacttgatgcccgtggtgttgaccccgccgccgtgctcctcggcgccttcttcctctgtaccggcgggcagggagtggcggttgaggtgcacgatcttgcgcgcggcagtcgcgccgagcatactgccgacggcggtgagcagtgtgacgaacaacgcctgcacgccgatgctgccaaggctcgacgtcacctcctcatccgcgcccatgcgcagccccatgaggaagatgagcagatagatgaaaaagctcgtgagcttgtccagaaaatgaaagcggtccttatggcggcgcagcttgcctgcgatgaggtagcaggcgatcataatggaccagtagagtgcgagcattgccatgaaagggaaccatcctttcgccgcgtggcggcaaagatagaaaaggggcggcgcgtgatccgcgccgccctttgctgctttgggatagggaaatatcaggcgagggtgttgacccaggcggagtatttggcgaggtttgcgtcgcgttcgctcgcgtccgcacccttggtgaggatgtagaccttgatcttcggctcggtgccgctcgggcgcacgacgatgtgcgtgccgtcgcagagctcgaagcgcagcacgttcgagcccgagagagcgatcttcgtgacctcgccgcttgcggcgtcgcgcgcggtgccatccgaataatccttgtacgtcgcgaccttgacgcccgcgatctcgctcggcggcgtctcgcgcagggacttcataagagcggccatcttctccgcaccatctaagcccggcatgacgaggttgtgcgtcttttcaccgtaccagccgtacttttcaaagagcgcgttgagcgcgtcgaagagcgtcatgccctgggagtagtaccacgcggccatttcggtgagcagcagcgaggccgtgactgcgtccttgtcgcgcacgtagtggccgatcatgtagccgtagctctcctcgtaggagaagatgacggtgtttttgcccgcgccctcaagctcgttcatcttctcggccatgaacttaaagcccgtgaacgtgtcgtagcagtcgagaccgttcgcctccgcgacggcgcgcgccatttcggtcgtcacgatggtcttgagcgcggcggcgttcgcaggcagcttgcccgcgcgcttcatcgcaccgatcagatagtcgagcagcagcacgcccgtctggttgccggtgacaggctcgaactcgccctgcttgttgcgcaccatgatgcccacgcggtcgctgtcggggtcggtgccgaggataaagtcgacgtcgttctttttggcaaggtcgatggcgaggtagaagccctcgggattctcggggttcggggacacgacggtcgggaaattgccgtcgatgaccatctgctcgggtacgcataaaaggtgcttgatgccaagacgcgtcagcgcctcgggcacgagcttgtggccgcagccatggaagggcgtgtagacgagcttgaagtcgcccgcgacctttttgacggtctcatagtcgttgaccatgctcatgacgttagtcatgaagcgctcgtcgcagtcctcaccgagcatcgtgatgagacccttgttgacggcttcatcgaagtccatcgacgtgacgccggtgaaaatgtcgatgtgctcgagctccttggcgatggccgcggcgtgctggggcggcagctgcgcgccgtccgaccagtagaccttgtagccgttgtactccttgggattgtgcgacgcggtgacgttgatgcccgcctcgcagccgtattcgcgcacggcgaacgagagctcaggcgtcgggcgcagggactcaaagagcttgacgttgatgccgttgcccgccatgacgcaggccgcggcgcgcgcaaactccatcgagtggttgcggcagtccatgcagatggcgacgccctttttcatggcctcttcgccctcagcgcggatgacgttggcaaagccctgcgtcgcccagcggatgacgtggcggttcatgttgtgaaggccaacgtacatcgtgccgcgcaggccggccgtgccgaattcgagcggaccgtagaagcggttttcaatctccttttcatcgtttgcgatggccttgagctcgtttctctcgtcctcgctcagcgcgggggaggcgagccacttttcatattcctgacggtaattcattgcatgtcctcctgttccggaatttcatcaatggggcggatcagattttttgcgtcctcaagcatcgaggacggcacatagagccacgtgccgctgccgggcatgccgagcacgatcttgccgaacgagccctcgccctcgtatttgcgcagcacggggatgtcatacgagcggagcatggcgcagagcatgtccgtctcggcgttcgtgtccattgcgacggtcaaaagcgcgggctcctccggcgtgccgtcggcggatttgggccagcgctgcaaaaggtcgttttctgtcttgccccaggtgagcttcacttcatccaacatgggcgttgtcctcctttatgttgatgatgggtcatttgtggtatttggttccggcctcgatctggtaggcgcggtagatttgctcgagcagcatcacgcgcgctaagtggtgcgggaaggtcattggcgacatcgaaaggcgcaggtcggcctttttctttaagtcctcgtcaagaccgaagcttgagccgatcagaaatgtcagctgtgaggcgccgcgcgcggcaaactgctgcatcttttcgctcagcgccacgctgctcatctcctgcccttcgatgcacatggcgatgagcgcgccgccctttggcagcttctgctcgaccagtgcggcctcttttttaagcgcctgacggatctccgcctcgctcggctcgtcgccgagacgttgctcgggcagttccaaaagctctaacttacagtagcgcgaaaggcgcttttcgtattccttgacggcctgctcgtagaaggcctccttcagttttccgacgcaaaggacggtgatcttctgcatacgtgtacctcgctgatggtgtcgcgcggcgcggtggcaaggcggacgctcagcccgctcgattgcagcgcgcggccgacggtgtattcggcaagctgcggggagttgttctcgtcgctcaggtgcgcgagcagaatgtcgctcgtgccggcgcggacgcattccacggcgaattccgccgcagcttcgttggataaatgcccgcattcgccgagaatgcgctgcttgagataatagggatagccgccatttttgagcatgacgacatcgtggttcgactcgagcagcagcatgtccgctccgagggcgaggtcgtgcgcttcatcggtgatgtagccggtgtcggtcagcacggcgagcgagccgtcgctgctttcgatgcggtagccgacgctctctttcgcgtcgtgcgacgtgcggaacgagcggacgtgcaggtccttgatggcaaaggtctcatccgcggcaaaggcatgcagatacggcgcgggatagtcgagcgcggcagcggtgccaaaacttgcgtagagcgggatcgcatgctttttttgcagcgtacccagaccgcgcacatggtcaacgtgctcgtgcgtgatgagaatgccgtcgaggtcgtcgagcgtgagatcaagcactgcgagcgactgcgtgatgcggcggcaggagatgcccgcgtcgatgagaaggtgggtatcgttgtgacagacgagcgcggcgttgccggcgctcgaactggcgagggtgtaaaattccatgggtcgattcctttatctctattcttcaaaatcataccacagctgcgcgcaatagtcaaaaagaaaaagcccccgcgcgggggcctgagaggaagaagaaagcgctgtcaaccggcggggaaggcgagagacgtcataaagccgttttcgccggtgcagacgatgtcgcccgcggcaagcacgccgtcacagacgtacagatcggcctgacaggggagcgaggcgtcaggatagttggtcacaacataggtgtaacgcgagagcgtctgcccgcaatagcgtgtgaggtcaaagccctgcgagagctggaggtcgttgtagctcaaatacggctcttcgagcgttttgcccagcgtgacgctcagcgtttcgatcggctggtcgttcacctcccagccgagggaggcaagataagcaatgcgctcttcatttgttccggcggcgatgacgggcggcggagacgaatgccggcacgcgcgcagcgccagaaagagcgagagcagcagcgcgaagatgagcagaatttttacaacgcggcgtttggagcacttggcggtgatgatgaacatgaagcgaccacaccctttcgataaaagctattccaccgaaagaaaaagtatgctacactgatacttcagaatgcagaaaggcgggaaccaccatggcacagcagagactcgacaagatcatcgcctcgaccgggcgctattcgcgccgcgaggtcaagaccctcgtgcgcgagggtcgcgtgctcgtcgacgggcgcatcgcggccagcgcggaggacaagtgcgaccccttgaccgcgcgcatcagcgtgaacggcgaagagcttttctaccgcgagcacacgtatgtgatgctccacaagcccgcgggcgtgctctcagccaccgaggacggacgcggggagacggtgctcgacctgcttgcgcccgagtatcgaaagatcggcctgtttcccgtcgggcggctcgacaaggacacggaggggatgctgcttctgaccgacgacggcgcgctcgcgcacgacctgctcgcgccgaaaaagcacgtcgacaaggtctactttgtccgcaccgacggcgcgctcgacgacgctgactgtaaagccttcgagcagggcatcacgctcggcgacgggcttgaatgccttccggcaaagcttgagattttaaagagcgacgcgcagagcgaggcgctcatcaccatccacgagggcaagttccaccagatcaagcggatgctggcttcacgcggaaagccggtcgtttacttaaagcggctgagcatgggctcactcacgcttgacgagggactttccaagggcgaataccgcctgctcacggcggaagagatcaaaaacctgcgggaaagttggcaatttgcccaaggaaaagcgggcgcggacaagtaagcgtttgtccttcctttacggaatgcctaaaaaagaagaaaaaaattgttgaaaagagaaaaaagttcttgcaatcgtcagacggagaaagtataatagtcccatcaagttggcagaatgcacaaactccctaataaatcaaggaggcacggaatatgtccggtaggatttttcagaacatcgttttacagtttaaggaaacgaccgatacggtcattggcgtgatcgactccgagggtacggtcatcgcctgcaccgacctgccggagatcggccagcgctggccgcatctggtgcagcccatcaacgaggccgagggcgcctgcaccgcgctcgagggcaagaccttcaaggcgctcgagggctggggcggtcagttcgactttgcggccttcacccgcggcgaggacgcgctcagcgcgaccgtctgcagcatggcgaccgtcgcgctcaacaccgccaagagctattacgaggaaaagcacgacaagacgtcgttcgtcaagagcatcctctccgacaacattctgttgagcgatatctacgtccgcgccaaggagctgcacgtcgaagccgagctcaaccgcggcgtgttcgtcatccgccgcacggacgaaaaggccgacgctatccccgtcgagaccgtgcagaatatcttccccgaccggcagacgagctttgtcctttccatgggcgaggacgatgtggtgctcgtgcagcagctcggcgacaatgtggagatgagcgaccttgaaaagaccgccgcgcagatcgaagagacgctgcgcgtgaacggtgagagcaccgtggtcgtcggtatcggcacggtggcgacgcacctgcgcgacctcgcgaagtcctataaggaagcgcagatggccatcgaggtcggcaaggtcttcgacaccgagaagtatatcatcagctatgaaaacctaggcatcggccgcctcatttatcagctgccgacgacactgtgcgaaatgttcctgcaggaggtcttcaagaagaaccccatcgacgcgctcgacaaggagacgctctttacgatcaacaagttcttcgagaacaacctcatcctctccgaaacggcgagaaagctgttcgtccacagaaatacgctcgtctaccgtctcgagaagatcaagaagctcacgggcctcgacttgcgcgagtttgacgacgccatcaccttcaaggtcgcgctcatggtcaaaaagtaccttgcctcccgcggcatcgaagcgtaaagaaaaagaatttgacaagggctgtcttcagacagtccttgttttttcgccattttgcggcaaaaaagttgaaagtttacataattacctgttgccatcgcggacttgccgcgctataataaagactgaaaatttgcgggatcgagtcaaaacctgctggaaactgagggaagagcatgatacgcctgagcgatgtagtaaaggaatacgagagcggcacgacggccttaaagggcatttcgcttcgcatcgaggatggggagttcgtctttttggtcggcccgagcggcagcggcaagtcgacgatcatcaagctgctcaccggcgagatcgtaccgacgtccggccagatcgccgtcaacggcttcagcctgacgaacattgccgagcggcagatcccgctgctgcgccgctccgtcggcgtcatcttccaggacttccgcctgatcgagaagaaaacggtctacgagaacctgagcttcgccatgcgcgccgtcggttcttcgccgcgcgagatcaaaaagcgcatcccctatgtgcttgagctcgtcggacttgaggaaaagaccgaccgttatcccaacgagctctccggcggcgaacagcagcgcgtggccattgcgcgtgcgctcatcaacaaccccagcaccatcatcgccgacgagccgacgggcaacctggaccccgcgcgctcgctggagatcatgcgcctgctcgagcgcatcaaccagctcggcacgacgatggtcgtcgtcacgcacgagaaagatcttgtcaatcagttcaaaaaacgcgtcgtcacgctcgaacagggcgtcatcacgagcgatggcgacggcgtcggctataatgcgaggtaagctatgcgcaaacacgatttttcttactttttcggcgagggcatgcgcaacatgttctcgcacggattcatgtcctttgcggccgtgggcatcacggtcgcctgccttgtcgtcatgggtacattttcgctcgtggcgtacaatgcgcaggtgcagctccagcaactcgagagcgagtatgaaattctcgccttcgtggacgagagctgcgacgatgcgcagaccaaggccgtgggccgcgccatcgagcagcgcgccaacgtgaaggaatgcatcttcatcagcaaggaagaggcgatgaagtcctttgaggcgcgttacgagggggacaacatgttccagaaccttgaccccgagattttgcgcgaccgctacgctgtctatgttgacgatctgagcatttccggcaagactgcgcaggatatcctcgacaatgtcgaaggcgttgccaatgtccgcgtggacgaagacatcgcgggcggctttatcacgctgcgaaatgttgcgagcgtagtgtgcatcgcgctcattgccattttgctgctcgtgtcggtcttcatcatctcgaataccatcaagctcacgacattcgaccgccgcgacgagatcgccattatgaagatggtcggcgcgacgaacggcttcatccgctggccgttcgtgtacgagggctttatgatcggccttctcagcgcggtgcttggctttggcttgcagtggctgctgtatgaatcggtcgcaaagagccttgcgatgtccgaccggctgcagcttctcacgatcgtcgactttacgtcgatctggcggcccgtggctgcgatctttgccgccgccggtatcctgatcggtgtgggtggcagcctgacggctatccgcaagttcctgcacgtgtgagggaggcggacgatgagcagaaaaaagatcgcacgcatcctcctggtgctggccgtcttcgcgtcgctgacgctgacggagttgacaccgctttccctggtgcaggacgcctccgctgttacgcaggcggatatcgacaagctcaaagacgagctcagcggtatgaactcggaaaagtcgcagctggaaaaggagctcaagtccatccagaacgacaagagcgcggcccttgcgcagaaggagaacatcgacaagcagatcaacttgcttcagtcggagatcaagggcgttgagtcgctcatcagcgagtatgagacgctgatcacgcagaccgagcaggagatccgcgagaacgaagaggaagaggcgcgccagtacgaaaagttctgcgagcgtgtgcgctcgatggaggagcgcggcacggtgtcctactggtcggtgctgttcgactcggcaagcttttccgaccttttgagcgccatggacttcatcagcgagatcatggacagcgaccagaaggtcatcgacgatttgcgtgccctgcgcgagcagatcgagcagaagaaggcttcgctcgagacctcccttgccgagcagcagagcgccaaggagacgctcgttgccaaaaagagcgagctgaatacccagcgcgccgaggcggaaaaggtgcttgccgagctcaaggcgaacgaagcgcagtacaagcaggtcctttcggaaaaggacgccgcgatggagcgccagcaggcggagatcgtgcgcctttcccgtgagcttgccgaaaagaacggcaacaccaccgtgacctatggcggctacatctggccgtgctcgagcaagtatgtcacctcgccgctcggcgcgcgctacacgggcatcgcgggcgcgtcgacgaatcacgcgggcattgacatcggccgcgtgggctacacgacgcaggccgtcgccgccaaggcgggcacggtcatcatctcggcctacaacaagtaccgcggcaactatgtggtcgtcagccacggcagcggcaacacgacgacgtatcagcatttgtcatcccgttcggtcagcgtgggcacgtatgtcgcgcagggtcaggtcgtcggcatcaccggtacgactggcgtgagcagcggcccgcacctgcactttgagatcaccgagaacggacagatcatcaacccgctcaagtacctcacggactatatcaagggttggtaaaccgcataacgcacaagctccccgccatatactggcggggagcttttttgcggggaggggtcattttgcagggattggtctgctatcgggacacgggggagaaaaacggcgcgcgcacactttgcggcgtgcgctttggcgcggcctacgcatcgcgcggcgagggaatgcttgctgcactttcagccaagcgcgcagcaaaatacctgcaaaagcgccgcgtgagttatgccgtgtttcccaaggattatccatatgcggaggtatttgcgcgctgtggtgtcctgccgccgcccgaaaagccgctgcgcatggcaaaggcggcggagatcatccgccgcgcgatggcgcggctcggccttgcgccggagcgggcacgtatcgcgctgtgcgcaccctcgcagagtgcggcgctcgaagcggcggcgcgcgagctctctaaagatgtgcgctatcttgcactctgcgcgccaaatggcgagcgccttgcgcgcacgctgcgctgggactgcggcgcgagtgtccatacattgcagacggacgagaggatcgccgccgacctgagcgtctgcttcgacgatttcccgctgcccgacggccttgtgctgccgctggggagcggtgcggtttctgtcgcctatgggacggaaaacctgggcgatgcagcgatgatctggaatgaagatcagctcatctgcgcactctacgcctcgcttgcgcgccgcgcggacgaaatttgggtaaaagatgtgaaaatgccgcccgatgggggagaaaacgcaaacttaccttgacaacacggggcaaaatcactataattatttcgctaaaatggtattcgtgtgcgcgccgcgcaattttgcgggcgcgaaagaaaggaacgatctcaatatggcgaacatgaaaaaagagtacaagatgagcgcggagcgcaaggaagagctgcaaaaggagctcacctacctcaagaccgtgcgtgaaaaggaagtggcggacctcatcaaagaggcgcgcggcttcggcgacctgagcgaaaacagcgaatatgatgaagcgaaaaacgagcagggcaagctgtactcccgtatcgctgaggtcgaggagattctgctgcacaccgtcatcgtcgacgaaaacgacgcgggcacgaacggcatcagcatcggctgccgtgtgaccgtgcaggatgtgaagtccggccgcgagctgcccgagtataaggtcgtcggctcgcaggaggccgaccccatgcaccgcgccatctccgaggattcccccttcggcaaggcgctcatgggcgcaaaagagggcgatgaggtcaccgtggaggcccctgtcggtgccatcgtctaccgcatcgtcaagatcgaacgttaagctgtattatatagagtaggagtaaagaaatatcatggctgaagaaaatatccagaccaacgctcccgagcaggacctcagcgagatcctgaaggtccgccgcgaaaagctcgcagcgctgcgcgccgagggccgcgatcccttcaaggagacgcgcttcgacgtgacgcaccacgctcaggacatcaaggacaactttgacgcgcttgagggcagcgaggtccgtgtcgcgggccgcctgatgagcaagcgcggcatgggcaaggtcagcttttgcgatctgcaggacaagtccggccgcatccagctctacgcccgcaaggacgagatggatgaggaggagtacaaccgcttcaagaagtacgacatcggcgatatcgtcggcgtcgagggcgaggtgttccgcacccagcgcggcgagatgagcgtgcgcgccaagaagatcacgctgctcagtaagtctctgcgtcccctgccggagaagtaccacggcctgaccgataaggaagcgcgctaccgtcagcgctatgtggacctgatcatcaaccccgagtccaagcgcaacttcgaaattcgttcgaagtttgtcgcgtatctgcgccgctacctcgactccatcggctttatggaggtcgagacgccggttttgagccccatcgcgggcggcgcgaacgcgcgccccttcatcacgcaccacaataccctcgatatcgacatgtacatgcgcatcgccaccgagctgcacttaaagcgcctgatcgtcggcggcatggagcgcgtgtacgaggtcggccgcatcttccgcaacgagggtatggacaccaagcacaaccccgagttcaccacctgcgagctctatcaggcctacacgaacctcgacggcatgatggacatcctcgaggccatcctctccggcgccgcgaaggagatcctcggcacctatcagatccagtggctcggcaaggacattgacctgaccccgtcgtggaagcgtgtcacgatggctgacgccgtcaaggaagtgaccggcgcggactttatggcgatcgagggcgacgccgaggccgccgtcgcgctcgccaagagcgtcggcgtcgacatggacggcgtggacaagacctggggcaacgccctgtacgagaccttcgaccagaaggtcgaggagaccctcgtccagccgacgttcatcaccatgtaccccgtcgaagtgagcccgcttgccaagcgcagcccgtctgacccgtacctcaccgagcgctacgagatgttcgtctgcggctgcgagatgggcaacgctttcactgagctcaacgacccgatggatcagtacgagcgcttcaaggcgcaggtcgaaaagcgcgccaacggcgacgacgaggccgagatgatggacgaggattacgtcatggccctcgaatacggtctgcccccgacgggcggcctgggcttcggcatcgaccgctgcgcgatgatgctctgcggtaccgactccatccgcgacgtcatcctcttcccgacgatgaagccgctcggagagtaatacttgaaaaatgttctgaaatgggttaaaaacaaggagaaatacctgtttcgagaacaaaaagttgtagcatttgagaagtgattttcattttaccacagctttaccacatttcatttcaaaaccccagagttaccccagcaaaattacgcgggatgagaagttgaaatatggagggttggaagaacctcttatttcaaaaacaattttagatcggcaagatcacccaagcgatgcttggtgaagagtgtggagtagttgccatactcttgtttgacaaaatcgttttgcctttcgacaataaaagttgccagataccttccgtgcgaagatgcctgactggatggctcattatgtggcagactttactacttgacaaattcgggtgaggcacttataatatacttaggagtaggaatactcttaacaggggtgtatctcagccctaagtgagaaagttatcgagtgagtttctcttgactctatgatcaagaaagttacaagtgagtgtttcgctactcagaatgcgattgtaacaggagggcgggcttcgtgcccgccctttctgtttgaatggagggaatatggaaagcataaagatttatgaaattgatgcagcgtatattgactacttggttccatatgcgccacacctttttcataatcgtcaaaagggacaagctaatgaacgaaagtacataggggtagttttacagatcaatggctttgactattttgccccgctctcttcattcaaaccaaagcatagaaagatgaaggaagggcttgatttcctaaaggttgaggattatgctgtaatcaatttgaataatatgttccccgttcctatttcggagtgccgatatgtgaattttaaccaggtaagagacccgtcatataggtcacttcttttggcagagtatcggttcattaaatcaattcaagagaaaatcagaaagaacgcagctgctttatataagcataagcaaataaatggagacaagacaccgttggcgaaaaggtgtaatgacttcgtattgttggaaacgaagtgtaaagaatatcgtcacaagtaaaaccttctatgggagccggcttaatgctggctccctatttttttataaaacaaggatacagatttcctcgacggatttctgtaccctatcttttttttgccagcggagccactgggcaacgcaggagcggcgattaaattgttcgagggtagagtttcacctttaagatttgaagcgctcagagaggctgtaaatggcttttacaaaggtttgttaaatctggtacatttacagtgtccatagggatcgctatgcctcaaccaatagctgctaacctcaacggtgcgtccacaattctggcagaggcatttccagcgagtttcattacctttgattctctcgttttttaccggctcgattactttaagaaagccgaacgtctgatttgtaaggtcatgcttgatctgagatcgggcgcaaccgcaggatctggtttttccattgcggagactatcggagaggacagacacgatgtttccgcatttgcattcgcagatccattttgctttacctggttttgagtctgggtctttctctattactttcaacttgccaaatgttttgcccctcaaatcaatgagggtgggagaggaagtatgccgaagacagccgcatgattttgtactattggttcgtagcagatttgtagaggacacgacaacggtattgccgcactcacactggcacaaccacataggacggcctggttttctgtcctcaaccctttttataacggtcagcatatcgaatgtgcggtcggtaagatctatcagctttcccattgaaatcctcctcaagagatcttgatttttccttcgaggttggagaaagattctttcttcttttccttcgtagcttcagcatagatgttcatggtagtttcaatatcagcatgacccatgatttcctgaatgactttaatatttcgctcgttctcacaaaaccgcgtacagaaagtatgacgcagattatgagcagaaaagtgacgaatcaatacaggatctcgcccctcttgatcggccagcaccgtttcatcttcgatgtaggcgtcacaaatgcggtcaatagctcggttgacactatgaggagagagaggatcgccgtagcggttttggaaaatgaagccagtatacccatcaacaacggactcattgaacccgactatcttttgtgtttcccattctgactgcagagcggctttgacctctgataacataggcacaatacggacgccggcgcttgtttttggtgttacgatatggaaacgcgccttttcgtcttcctcatactttcggtagaccatattgtggttgatactgatgatcccttcgtcaaagtcgcagtcttcccagcgcaggccaatggcttcaccgatacggcatccagtaccaagcaagacagtgaacaaggggagccaatgattataaactttgtgatttctcatatagtcaataaatgccgtctgctctgcgatggtcagcgcgtgacgctttggcttctcccagttgtggctctttttgatttccgccatcgctccggtagccgggttgatacggatgtaattatcacggacggccagagtaaatatggggtggatgatggtgtgaataatttccatagagttaggcttgaagcccttctctttgatgagcttgttatagaaagccttgacatctgaatatttgatactggctatctttttcttgccaatatcgttcctcacatacttgttatacatatagaggtaattgctacgagtggtatctttcagctcgggcttgtttgccatatacaactcgaacagatcattgagcgcagctttgttttcgaccgcagccttgatgccgtcttccagatcgcggttgatctttcgttctttttctctaaggcagagatcgtctttgcagcccggagggaggcggtcagttggaaccagtcgtttgctatacacgtcatgccgaacaccatctgcgtcggtgtaagtaaaacggtaggtaccgtctttcctttgggtttcgccgtcttttaagatacgacctttgttgtctgttcgttttaagccagccatacttatcatcctcctttgtttcgatggtaagtctacagttacataatatcttgaggggtttctaaagtcaagcgataaaatcgctaataggttactttgaaaactgtctattgatttttgtgctttagcaatttataatgatttagcaaagattgtgaggtgttagtatggcaatggccgagaaaatcaaaattgcacttatcaagcgtaacatgactttgaaagaattagcgtcgcggcttaactgtacttctcaaaatcttagtggtaaattcagacgtgataatttcagtgaaaaggaattagcagagatcgccaatgcgctggactgtcattttgaaggaagatttctcagaaatgataatggcgaagaaatctaaagctataagagcgtagggttttcacctacgctcttttttatgctatcaacaacaaatggtatcgttagccacctccttttcgatacgctgattccaggcttcgatagcagcattattcaaaacctgagcaggccgatcataccaccctgcgtacatagagactgtcgggcctctcgtgtggcatttgttgcaacgaactgtaacgacgaccagtttatcgcatctccctgtttcggggttccacttcgtattactgcttgctttctgatcgactttcagctttgtgctgccgcaaaatgggcaaggtaatggctttaagtttaattcgggcatcggtatcctcctcttcggactcgtatcttgggcagggcggcataatcactgctctttggtttttcaaccaatcgcacggaactaagaagtcctttttatgcctacaggtaatgcagttcgcattattgctcatgatcagaacttcctcctccaatacgtccgttgccagtctctgcggaataagtggtgccagtcgttacattcttggcagtgcccattactgccaaggcattcctggcaatgtctgatatgagtttgaacaaagcaaaccaacctccaccggacaaactgcttaaagttcatctcgcacctctttctctacggcttcaatctcatcttcgttcaaataccacatcaatccatcgtatggcgaaatcgcaccatagcagtttggcttatcttcattatcaatttgcttaatggttacgatatctccgtcatcaaagttgccgccgctatacacgtttttcacgcgaacttttgatccgactttgaatttcatatggctgctattagctgaaggatctatctctatggtttctattaccgggacgacttcaaaatttctatcccaagatgagcacccggctttcgcctgcgcttgagagcgatacgtttttatgggcgtgtcttttatctctgaaatcggcttgaagtaaaagttctttgataggccgcaccacacttcgcttcggttgttacgcataacaatgaagcgttttctggtaatgttcatttcggttcctcctccgctggccgctggagccagtgtagccaatatttggcacgatgcgccatgctgtcgtagcaaagttcttcaaacaatttcgccagctcctcgtctgtcatggaacggattttctgtgcattcgttttcgcattgaacttcttaccagtcgccttttcgtatcgagccgccaatttctgcatttgctcgctcatgggtttgctcataccgtccccacctccggcttatgccggtaaagcgtaagaccacgtgatttgatgtcgtactcaaagtttacggcggtatcgccattatgccatgttccaaccaaaaatagctcgttcgcccagcttccgactttctccatcttcacaatgccgtagcattctaactctttacaccatacaggttcaccgcgcatctgtcgtagctcatcaagcaccagaggatcattgtgtacagactcttgtttatgtctgatcttatcgctctggcacaacgggcaagacttacagcgggcgattggctcgtcgttgttgtctccatagatttgataagcacatccatcgccatcaggcacgtagcatggaggcgtaatttttacgccgcaacgctggtcaacggggatgattttcccactatctgtttgacgatacacaatgccactacaatttgcacattcgctctcctgcttctgctggatacgaagagcggaaatcgctatatcacaggcatcaatgtacctttttatttgacccgctgcggcttcgctttttgggattcctgccaaaattgcagttatttctgttgccaaacattcaaagacagcgatagcctcttctttggtcattacgcctcactcctcttgtgttcaaagtgatctacgatcaagcgatatgctctacgttgcatatcaagatcctcttgggtgatgttatccagctgtccgagttgagcctgaaacagcttatactgccggcgaagctgaatggtgttttgaatgatacggataatctgagtaagaactaagatcgttaccatgatggtcaggtaagtgttcatacggcagtctcctatacagaaatagagttgatgtagcttttgattttttcgacattccagaagattcgcttcccgatctggatacgagcctcagcagcctcgccaatctgtatggcagaataccggccacaactcaacatggcctgaagctcgtcagtgttaattgtgattttgctctgggtgtctacgttattgaattgctttgttgctctcatggttattctcctcgatcatcatgatcggctgccatcttttcctccaatcggtttacagcttcaacaagctcattcagcttgtccaatactttgtcataatcaagcagaggcataaaacgtttaggggtaaataccgcttggcatcgttttttgccgttatttttttcgattaccgcaaggtcaagttttgacaacaatttgattttactcatggttctccctcagttcattgacagcagctactactcccatctccgctggtgtatttaaccaagctaagatgtccgagtaatcctcagaaaaagtcaattcatcttcaaacccaagatttttgtacattaacctacaaaactctttttggttatcgtataacagtttcgccaactgctgatttgtcgcagctcgcatacggtctgcattggtcaacgctttgtcagacggcagcgccaccagccgtccgtctttgtcggcctccgctatttgaacatcacttagggagagtttcttgcacatggggcgaatatgatccataaatacttgcacaatcttcttggcattggctgtgaagtctttttgaatgcagctccagaggtcgtaatcgtcacaggtttccatagatgtgccctcgaactttcgctccaaggcatcgtggacatctcgctcgttgctctgatagcaacagtctttgatttcgtccatatcgaatacggggtctccccaacgatctgtttctgagaaatcaacgccccaagcctccatgagttcttttacagcctcaaaggtggcttcttcgttgataacgcacgggctggcgagcttatccagcagatagccggagtccaaccttgccatgaggtgcataaagctctcgcttttgtgggtaggaacccaaccgtaggcgtagttcccacagtcggatgtaatggacagctcatatcgttcgagatcgaagttaaaaactgcccagaggcaagacccatagtcagggtcgcctctttcttggcagaaataaagggaaatgagcggcgggattctggttgaaaccttagccattttgtttactcctttctgatgaagcggtgtccgcgtagagactgaccgctggggtaagatgaaagaactcagtatggcttcctacatcaaaaatggtgacgccattgtgattccaagtacgggtgtaatagattttgaaattgcgctcggcacagaacgcatgaatcagcaaaaacgcctcatccaaaatattctggtcggatttgggctggcctgcttcgttcagatcacggatctcagcaatctttttgggtcgcccatgatatcctttgaatttgagagtatgggttttcatttttgccacctatgattgatttactttgttgctaactaaaggtttatgactacataaggacggtttgatctgtgacttggttgctgtcggtaatttttacctgcatatcatctgttaccggaatacgcatttgtgcgtaaccagaggatgagaacggcatgaacccgccaatccgatacttgtcacataccaactcatcgccgtcaaaacggaaagagttgccatgagcgtcacgataggttagctcacgattgcaggttgacagcttcgcatatttcccacgataatcaggagccttcagctcataatccgggaacgccgcgatgaaagcgttgtactgctccgggaataatttggacaactggtggagaaagatcgggatggtttctgtttgatagctctcaatctctccaccaagcatagcacgcggatggtaggtgcaaattcgattgatattgtctggcgtcagctcgtcaatagggacaaagagacgattgcaaccgaacccaggattatgacagaatagcctggaatccgggccgcgttcgattctgacatggggcggcgcgagaaaagcaccgtcaccgatttttgcgatgtaggtgttgttggggtaagagagcttatggtatcgctcagagtctttggcctcgctataaacacgaccgtacatcttggttttctttgtgccgccatcaacacaggctatgcggccaaattcacaacgaacgccaaatagtgtcgttttacggaagcattttccttccttgtataccgaacacacatcggcatgatcgcaataaatgtactctgcgcgaagccgtgagtcacggctaccgtcaccatacagatcaacattgattagtttttcttgttcagtcattgtgttatacctcactaataagagcgttgccgcaggtaatgcggtcggaatcctcttccttgctgggaacaaacacgattacgtcccagcccaaatcaagtaagggctgctcgaatttgtcgtagacactgtaatcgtcgtagctggtagtgatatcgtagttgtgttccagagcggctttggtttggtggatcggggtaatcttgacgataaacttatcgcggtcaaagagggagtcgagcactttggcgtccaaaatcgttgcttcggttacagcaaagttcaacgtgtactttctgccaaccggcataggcaaatcgctggcgatattagcgatttctctcaggctcagagatttgccggcgaactgagcttcccgctggtcgtctgaagtgctgttgatactaagttgcagtccagcttcaccatgccgctgggtattcttgatttcgcaccaatgcttcaaatagctggagaggttgttattgctacgaggcatcatggtggaaactacggggtgaatggtaacagcgtgaagaccacactctttaaccaggtcgtccaatcgagactcggtaaaatccagcactgcaggattccaagtcggctcacccatgcgagcgtagtgaacattgaaacggttggtaaaacggatatcctcatgttcaatgatgtagcggatctgatattccagatcaggtagagaggcatttccgaagaagccgtatttatgaacatcgcagaaggtacacttcatggggcatcccttctggctgctgatagttgcaacccacttgtccataaggtcaacgtcgtggtgctgaacgccctcaatctttttggttaagccgaggaaatcggctttgatgttgttttctttgccgtagtcacccacggtaagaaactccaaaccgagcgatcggttgaagtagattttacccgtgtgggtcaataccatttgtgtatccattgtgatatcctcctgggttacataaagaaatggagcagccacccggcgaacagtgtgagaagcgcataggtgatagcagtgatccaacgatcccagaatgggtcgggggtggtattgactctggtggtcacaatgaatgtgatgagcgtatcaagccccagcgcttgtaccaggccaattatgggaagcccgagcgggacaacgaaccagttccacatgaacatgatggtcgctccacagagcacagacagcaccacggacaaaatgaattgcaacagatacggagggtcgctcagaatgggcttcgtatcattctcatagatatgggacatttttatggcctccttaaatcaatctttcgatatattcccgatcctgagtgaagatgggaatttcgtggtcgataatccatctgttacggcatacggtaattttctggccggggttgcgaggatcgtcgatggtttcttcaagccgccgtttaatgcaacaggaaccacgcttcagctctgtgaggaaatcgttccagttaatgcctcgctgagaccaaagcatttcctgaatcatgttgcaggtctttttgtgcagctcgtgatggctaaaattggcctgacctacggcctcaatgctgtttcgggttgcgtcctgctgccgccagatcagacagttacagacctcttcttttgggacagagaaaacacgggagtcgaacatggcagtgaacatctttttctggtaggcgttgtaccgtttatatatggtaagatcgacgtcaacatcgacaccgatagatccccaatacgggccattgtcgtgaaaccaaccctcagcgatacgttcaaactccctgttaaatgccatagttgccatcgacgccgaaacgctgcacattttctgaatgttatatccaaaccaggcgtcggtctggatagtagcatagtctgtcagcaccagagtgatctcatcggactgagtgtaaccaagcacacagccctggatgttctcacagagatacttcatcgtctcctgcatagcctgagtcagtacgagatcgaaaggcttttccatgcccttcgtgaaggtgtggaacgccttgccgtcaagtcggatgattgcgggcacacggcgggttaagaagttgcgagaaacaccctcatagcctttcatgcggtcgcccagactgtcgtttttctttgccattgttatttcatctcctcccaaggaatacggatagcgtgcttggtagtcagcaaataggatgtgcgcccatatttctttttccactcgtcgaggtagcgctgcatttcagcaacagcgtctgctccaatgtcatcataggcatcttcatacatatcctcgcaggcgtcagatacaatgcttgaagcatcgaaactcatctctacctcttcggttccccatacgtacagcggcttctccgcaaactcttcacgatcttcattccagctatcaaagaaatcctcccagcagctgaaatatccttcgttgtgagggtagaagtcgctttgtgccattgtaaataacgatccgagcgcattcggctcgtgcttttctgctttttcgagccgttctttttctttgcggttttcttcctgctggcggcgctgcacaacggcatcgcagtcgcaaagtgttcggcctctcggaatctgctttccacagtcggggcaaaaacgtacaacaccgttataacagttcgggcagaaccggatagactggtgcttgtaggggaattggccggctctcttatcggggtcgtcagacaacccataaggattatcttcaatacggaggccgataccatgacaaacagggcaaatctcctcattgtcatggagatcctttatgagtttcttcccaatcagctctccaaaggcgtcttcaatgttgacgacctttcttgtaggttttacaaatccgggcatacctcagacctccttgtagattgcagggaggaacgcgaggccaactttttgcgctaccagataggcggaatagccgtcaatcaagacggcgttatcgtccagggcaacattggtattgaactggccggtatgatagaactccagaaaacgctttgcgatcttctcatcgctgggctttgtgcgggccatatatcccggaatcttgatggcgcttatcagtacctcctgggtggtggcttcgattgtggagagcgggaaggtagcgccggaggccaacataacctctttcacatcctgctcgtcaagatccgcagccactacggtgccataccgccgaccacgcgctgtattacaggccacgcgaaatccgggctgaagttcgcctacaaggtgctcagggatctcgaaccagaacaccttgccatagggcttatgctttaccatagctactttcatttagcagtcctcctataaggatagaataatttactttgttgctatatacatagtataatcacggcctcccaatttgtcaagagggaagccgtgattttctttgttgctaatgaagtttgttgtcagtctgttgaagcaagatggaggataatggcctgtggattgtcgcagtctttcagggtcgctttatagtgctgcttccaccagccatacaacaactcaaagttcttgatgggcagatattcctccataagaagctggggatcatcttgtgaagcatagtccaaccgaagaagtttgatgtcatcagcggtaaaggatcgaagcggcttgtactcgaacttggtgacaatagccttacgccgaatggcatattccgggagctggctggctggactccatttgatagcctcgtcatactcgttgggtacagctctgctgttatcccaagcatataagccatcggagcggtatatgatacctacagtgactttcttttcggttgtctctccgtctttttcgaccggctcaaaaatagtcagtcttttgaacggttcgagaatgttcactacttcaccgatttcaggcagaaaccccagagggagtgcaaaccccttcagtagttccttctcccaaaggtcgatgtcgttcaggttcatcggcaggttcatggtcgatcgcctccaatctgatttgagctacttgcgcccaaggcattccatagtaagggcttttctttttatcacacacgccattgtcaatcccaatgtatctgcgtccttccagcttggcagcaatgagagtagatccggtgccgcaacagttatccaggacgattgcattcctgtcagtgtaagtacggattgcgtagcgcaacagatcaacaggtttttcagtggcgtggagcgctacggacgggtggggtttagggaagcgccaaattgacgctgggtacttcatgttaccgtctggcgactctaccaatgtatagttgccatagctccggttagaatgaacgtcttccgcctgtttccctacggccttgcccttggtgtggtttttctcgccaactgtcatttgcggatgatatggcggtggagatttgtagaacaccatgatatcctcgtgctctctaagcggcattttcttggcgttgagaaatccgctctttagcaccttgtcccagatgatattgtagcggtgcagcttagggttagagagcatcatggtagcggtaaatttatcctgtccgaacagtaggattgcaccattcggtttgataatccgctcatactgctcccagagcggagcaggcgggataaccgagtcccatgagttctgagtcgccccataaggcaaatcacaaaggatcatgtcaatgctcgcatcatcaatttccttcatgacttccaagcagttgccattgacgaccgtattagggaggaggctcatacgctatcaccatccccgtctaccgttatggtataggctatgaccggggcgttgaaatgctctgcagcatacgctcggatgatttcttcggtgttgtcaatgagtacaccaccaatccgacgacctctggtatcctcagacataacaatcggttcagggatagatacgcctgtccgccgcgccatgtcttttacgtaacgcttgttgatggtagttggtacgataatcggatatccggttatcgccgatgtgtaaactaatgcggtcgttttaccgccgccgcgttttcggaatagacctttcatgttctcacctcttcatagtcggagcaaggatatttggcgctcgctcgctcctccttacttttgtatggacagtctggaactctggcctcagcgagatgagccaagcagattactttgcccagctcgtctacggactgattatcacaccatttagatgtgggtgaaattggtgtttcattcacgttttagctctccttattgaagcgtatgcccctcaacctggtatcccatgcgaatgcctttccactcaggtttaagcatagctttcaactcagaggcaacgcccttacacatccgtgtggtctggccgtaaacttcgtattcgcacagataagtgtgatctgctgaaaggccaaaagctacataagagatgtgtaactggttagcccaggctataacttcatctaccttagccttgtgctgctcgtagtagactttggaatcgtcaacgttttcctcaagaaggaaagaacccctcacatatttctgctgaagcacgttactcacctcttcccagtagacccgataccgcctcgatcagcgttgcccagcgtatcgaccggctcgaaaaacagctggggctggtgcttctcaatgcgaaactgacagatacgatcgccgacatgaataacggtatggcggtctgcacgggcggggaaataccactggtcgttgtcaccacagtaagtctcgtcgattacgccgatgctgttggtttgacgaataccgaaattcttataggttgagctgcgaggggctacgattgcttcataacccttgggaagctgcatagcaattcccaggggaatcagcttgaactcaccagccttcagctcaacatcctcagctgcccgaaggtcaacccagtcagacttgccgtcgatatattccaatggttggattttatcgctgagatagcgcaccttaattgttagcgcctctgtcgaatcagaagggcgtgggcagacatcagaaggatgcgggcagacaagaggcttgccgtctgctgccaaagcgtccagtacggtatcaaccaggctgtcatatcctgcgaaatcgccgttgatgtgcagacagtcaacaccgaacttgtccaagaaacacagcatttctttgctgattgcatcgctctcttcctcggtctggaagcgtcctacttcgttataggttttcacccgatgaacaaacacgtcgatgcggttatagtaatcgaagactttgaaaaccagtttgtcgaactcttcacccagcacgtggtcgttgtcgttatagaacgcagaaagcaggataggtgaatcggtaatcaccacatcgaccttgccctcaagccggctgatgcggaaatactgcttgccaaagatgtatgcctgattctcgaaaacggcctttgttccttcccataccttgtctttggcgaactcggtgacaagctcggcattaacgccggcagctttcaactgagagaagacataggcagctccggtggatttaccagcaccgggagcgccaaaaaggttaatgatgagcattttcgtttgcctcccaaccaatttgatagttttttgtgcggatgatactgttctttacacatgggtgcagtacacagacttccagctcatgagggatatactgatccaaaataacacaagaccaacattcccctttgcaattctctgaataatgagatcgaatctcaaaaaagaacagtccgctttggatttgatacggattaagcattttgcgacaggtacaactgcgcaattcggaagtgattttttgaacccaagtatcacgatcttcggttaatatgagaattttgatcacaaccatcaccacctatcccagatactttttgaaaagctctgcaagggttaggttgttttgccgtgccagatcaatcgtgcaagcgcaaacattgcgctcggtagaagccccaatttcatcgcaaagatagatgagaatgtcggggtactgatggtcgtgaaagcattcgtccttgtccttttcggtgccggcgcaatcactgcaatcccgacaccactctttacgctgaagaccatcccacgccatcagcttttcaccattgataacataggcgcagtcaacagcgcccagattagaaccataagcgtgacgccaccagccccaatcgtccttccagtcatcgttgtcgatagcacagatattgtcaaaatcctctttggacaacagccaaacttggtattcttcacgccaatgcgtaggctgaggctgataatggtaagtacacacggcagatgtcaggccaagactttttacggcattggcaaattcgccacctgctaaaatttcaacagtctccatatttcctcctattcgtaacgaatgaagtgtacggtattaaactctttaccgggaaactctttgagccggatagaggagcaccaaccaccgacatgaatcttttcaacctcgtagacctggccttctgtcaaaagctcatgagcctgtttgggatcacagctcaacccagcgtccagatccacggctttaaccttacatccacgctcacaatgcagaacatcagattgatcctcggcacatttgctgcatagccactttaaccgataatccagtgtaatactgtccaggagcttcccgcatttgggacagcgaaattcgatcttttcattcatagtgctcaccttcatataggacaattttcttttggcgcaaggttttctgtacgtcgatgacccgctgatttgcagaaccacaccatttcaacattcggtcagacagctccattttgaaggggccgtcaatcacaacatcacatgatgtaagcaaggccatttgtgcaaattggtgattatcctcgtctttatccgggaaaagagggttataacagttctcccagataaatccagtccatagccacacggttttaccgattgaatgtgtgtagaaacaaagatcaatgagatcatgaatcccaccgtagtcctgacaaagtggatctccgccaagtagagaaagccctgagataacagggttggcaagcattttgtgaatctctgcgatagtctcctttgtgaatggtctaccacagttaaaatcctgctcctctggattaaagcaaccggggcagtgatttgtacatccgcttacgaagagggaggtgcggactccctctccgtttgcgacgtcatagttgcggatcttcgcgtagttcattcgtcgccacccaggtggacataacgttctttgatttcttgcgttctaccctgattccagtcattcaggccgatgtagccgcaggtacgccgcgcaatgttcatcttgctcttatcggtattcccgcagttggggcacttccaaatcagcttgccgcgatcgtcgtccacaatctcgatttccttatcccagccgcacacctggcagtagtcggatttcgtgttcagctccgcatacataatgttgtcgtagatgtacttcaacaccgtcagtacggcgggaatgttgtcagagaggtttgccacttcgatgtagctgattgctccgcccggagagagtttctggaactgagactcaaatctcagcttatcaaaagcattgatatgctctgtgacgtgaacgtgataggagttggtgatgtagcccttatcggtgatgccctcaatcacaccaaagcgcttttgcagacacttggcaaatttataggtggtgctctcaataggagtaccgtagagagaatagtcgatatcctcagcggctttccatgcagcgcacttgtcgttcatgtactgcataaccttgagtgcaaaaggctctccgtccgggtcggtatggctcttgccagtcatcgccataacacattcgtataggccggcataccccaaagagatggtggagtagccgccgtgaagcagtttgtcgatggtttcgccctttttcaggcgggccaaagcgccgtactgccaatggataggagaagcatcggacagagtaccgctcaaacgctcgtgacggatttgcagcgccttatgacacagctccagccgctcatcgaaaatctcccagaaggtgtcatacagattctggatgtcgttatggtcgccggttgcttcccaaactttcagagcgctcagagcaacatcggggaggttgatggtgacgactccctggttgaaacgcccgtaatacttgggcttatcgggctggtaattgccggcattggcaacattgtcccagccgttaccggagcggtcgggtgtcaagaagctacgacatcccatacaggtatagcaatcgccgttaccttcggtttcgcccttggacagcttgtactcgcgcatcttcttttcggagatgtagtcgggcaccagccgtttggcagagcacttggcacacagctgagtcaagtaccagtagggagaatcctcagtgatgttatcctcttccagcacatagatcagcttgggaaacgccggtgtcgtccaaacgcccttctcatttttgacgccttggtaccgctgccgcacaacctcctcgatgatcatagcgaggtctttcttggtctgaggatcgctgacctcgttcagatacataaagacggtaatgaaaggagcctgaccgttggtagtcatgagggtaatcacttgatactggatagtctgaacacccttctttacttcttcacggacacgctcttcgaccagatctgagatcactttctcagggtctgcaaagttgtccggggaagaaattttcaggaactcagcctctacctgcttgcgaatcttttgtcggctcacctcaacaaagggggcaaggtgggacagggagatagactgaccgccatactgattactggctacctgggcaataatctgggtagcaacattacaggcagtcgagaaggagtgaggcttttcaatcagcgtaccggaaattactgtgccgttctggagcatatcttccagattgatcagacagcagttcatcatgtgctgcacaaagtagtcgctgtcatggaagtggataacaccctcttcgtgcgcctgcttaatgtcatccggcataagcagacggtcagtaatatcgcggcttacctcgccggcgatgtagtctctctgagtagagaggattgtgggatttttgttgctgttctcctggatgactgtttcattgacgttatccgcaatagagaggattttgccgtccagagaagaagcgtttcgcagaagctcatgttcatagcgatacttgatgtacgctttggcgactacgaactcgccccctttcatcagctcagtttcaacatcgtcctggatttcctcaacagaaatcgcacggttgcgccgctgatagcggttatacaaacgggtggagattttcttgggcacctcgttcttatctcctaccgcactgagcttttcaacctccgtgaatgccttgagaatggcgttggcaattttgcctttgtcaaactcggcttcacggccatcacgtttaatgacaaccataaaaattcctccttacaaaagatagctgtggataacttggtcaatttcttcccacgtgtttacccggagcgcatcatgagctacatggtcaaagctacgattatggggacggtcaaaaagaattttggcgtattcgcccccaaccaagttgtgtggggcatcgtcaatcaaaacatcaccacgcaccatttgcttgttgcaggcaaaaatgatgtgctcccagtccaggaaggggaacagctctaaaagccgttccaccttcgttttgcaggtgtgatagctggatgcagtcaccatatagagctggtgcccctcgtcatagagcttttggagtacctcaacagagccggggatcggagtgatacgccgccaaagctcgtcatcatggagtacgccaaatacctgctctttcgtcagcgtggggaaagcaagggagatatcccagccgtgaacatcttccggcgttacggaggtgccataacgctcgttcaacattgcaatccagcaatcactcaggttttctacggtatcgtcggcatcaaacagaattgtcagtttcttcatggagttctcctttgagagcgttgttcacaaagttgtttacggcctctttgagatcttccaaactgccgctgttgacgatcgtagcgtcgtactggtaatcgtccaatgcagtctccgaagcgtgcttctgctgctcttcggtcaacggagacacaaagttggggcgaactacccgcaacaaaatagcgtccatgccgtaggtttcgtagatctcatactcgttggggaaacgagtatcagggataagcacgtaatcccattcgtcgcagaagatgtcgaggatactgacgatgaaatctacccaataatcaggagagacagcgcggattttgtcagtaccgacacgctggagaagcgtgcgtcccttttcatctttcttgccgtcccagccaaagaaggtcttacatacgtacttgaccagatcgccgtagtgggcaatcaaaacacggttgccttgggcttccaaagtctcctccaaaagtttggcggtagtgtctttaccgtgctgggctttacccgaaatacaaacgattttcattccgcagctctccttccttttctgccgcaggacttcttctcccggcagaacccgaagtattcacacttcggcataaagtagtgatcgaccagatatgcccactcgtcggaatactctctcagagcgttaccaacatcagcgaacaggccacggtactcgtgataagctctgctgcattcccgctgatgcgacatatcaattaggttgcggagattatgcttgcacacaatcttggtgcccatgcccagaggaagcccaagcgcagaatcctctctggggataccaaacccttccaacatcttcaagccggtctggatacacttcataatccagtcgtagactttgacggcggcggagttacccgcaatgctgggcggtgttacataatcgaaaccgctttcatagtcgatatatctggtactggcctgcagtctggtgggagcgccgccgatgtgggtataccactcacggatcactctggcagaatagccgtccaggatcatatagacatccgggaactcaaacgttctgccgtgctcgttttccaagcaatccaagccgcgtttgtagtttttttcggggtcgctggtatctgcaccccagcagacaccagcttcctcaccgatcatggaaatagggttcttataggtgaatcgctgaattgtaactgttcccatgttgatcctccttgcttaatttactttgttgctatcaaatataagtgcgaaagacgtgatcgccgatcgtcttataatagctaccataggtcaaagatccagtagagaagtacactacgtcggtattcaaatccaacgctggatggccggcaagagcagcatctactgcttccatctgcacagacccatagtaatctcctaccacaaactgacaaggtgagaagagaatatcactgatactgccggaatacgcttcgtgcatatagcggttaagcgctacctgcaccacggcaacctgaccatcaaagctctggtttcctgcttcgctgtaggccatacacgccagcagctctttttcggtatccgtgggtgacagttctgcatatgggttaaggtctgcctcgggttctgccggttcttcctcaatagaaataggcgtaggtgtgggcgacacttgaggcggcgcagagtaaacacaaagttccttttcgatggggacttgtggtgtttcctcccctttgttcgggacgaacaacattgcactcagagatccgcagactaccaagaaacacagcgtcgccctgagaactttcttgaaccatttcgatttcgtctcgtgcattaaaaatgcctcctaaattacatagtcgtagttgtacaaatacagatacccacgccgctcgccccatccattcataggaacataaatggtatcgtagcgttgaagcggtttgcgatcgtagagttctgagtagattgtccaccgatttgtttttcccgtgccaatcgaccgcacctgcaaggcataagcccaaatctctttggttttcttgctccgcaaggggtagatatccagaataaccagttttcgctgatcttcttttttattggtggttaggtcgatatagcccagattttccaactggatttgcattttgcttttcaggtcgaaatcctgaatgtgcatatccctgaccatcacttccaaataccgaagtaatccgggcaaatcggtgaaggtatagcttttagctggctggccgcttttggacttatcagttgcatactgggcgattatgggttccaattcagccgttaccttgtccttggagatcttcttcatcgttccgctcttgaagaaagaaaagaagttcaccatacgcaacaactctttggaattgccatactcagcaaagtagtcgatcttcaccaaaatatcccgctgccgtgtatccaagtgtgttttctcgtccagctgcataagcaagtccatgaaagactcaggcttgccggcctttgccagctcatagagttcgttggcaacatcggcattcatgtactttacagaagaaatacccttggcgataaccttctcttcggtattcagcaaatatttatccttggaaaggccaaaacgcggcgggacaattctgataccgtaaagcgttgccagctcgttcccgttcttcacatcctcctcgccgttggcattgttaaggtaggctgtgatgaactcatacggatggtagtaccgcagataagcgcacagatagccaatcatgcagtacccgactgaatggttataaccaaacatatagctggaagcgtcttggatgatctgcaagaactcctttgcctcctgctctgcaacttcacgggactgcggtgacttttcacaatatccctcaagaatttgtggaagagcttttttcaaccgttcttcgtcttttcgtccgatggcgcggcgagtgttatctgcatctgacccagagaagccgcagatttgctgtaggaacttgataacgtcctcttggtaaataagatagccattgttatctgccaaaagttcgtcgatgataggagaggggttcttgtgaggcttgtgctgcataaggtcgtcgcggtacgacgcgcccgaaggacgaagcgccgctgtaacaaggctcatgtcgaaaatgctgtgcggctcgtactgcctaagcatctggaacgcgaactctccttcaaactggaagataccaatgggagatctcagcatatccttccagacagcctcatcgttccagttgatttcgtgagacttcgggtagggcttacccagcagctcataagcgtctttgataatctcgatgtttttcaatccgagaatgtcatacttgaccaaactgacctcatgcacacactccatgtcaatctgcaggatttccttaccgtcagagatgaacgtaccgtagttatctcggagggtaatagggcttgccacaataccggcagggtgcatagactgagagatcgccacgtcaagaagcccgtcgtagtagtagaatacttcgggatacttttcccgagccgctgcctcgtctgcctcaaactcctttttgatattggcacttgccttaccagcccaggggttcttagcaaagatcctttcgttttcctctttgagttttgtgtactctttggaaaactgcttgatcagctcggcacgggggatgtccttcatgcggctgggcaaaagaagattgccagcctcatcaaagaaatacaggctaaatccgtctcgcgcatttccaaaaacgatcttcacgttctcatctttgagctgtgccatcactctacggaactctttctcgtcccgttggtgttcacgattccaacgcagtgccaaagcacggcagatctcatcaatacagcctttggatttgatagtgccgattgccagaataaatgcggtcttttcctgaccaaaacggttgatgatgtagtcataaaccagatcgcgctgggagggtgacacgtcgatatcaatatcgccaatctccttacgatcttcgttacagaagcggctgaacactgtatgccatgtctcaggattgaggtctgttgtattggtgacataagctacacgagatccaccacaggaaccacgattgaaaccaatggggataccatgagatttacaccatgtcaccaattcactcatgaaaagcatgaagccggacatctcaattttgtcaaagacccggcattcctcagcaatggccgctttgaacggctcgatctgctctggagtgatagcaccctctttgatctttgcttgtaggttatcatcaagaacttgatgaagcacctctcgatcgcgttcaccatagagaatgggatacttgaacgagatatccagctcaaacggctctacagagtcggccatacggttggtgttctcaatggcctccaaatacatcgcttccggtaaggcgtcctgcgttgcgaacattgctactaactcgtcataggatttataggtaaggtcaaacgtatcttcgtcggcaaactcgatgtgtttactcaactgcaagatcgttcggcactcagccttgtatttgttgaggctatgagtatcggtacctgcaatgagcgggatgccgtatttctgagacatttccgccaagtggcgattgtaggcaacctgctccgggtggtcatgcgcttggatttccagatagtcgtagtgcttcagcagccgctcatacataggatgagtaatgctcatgcgattcaacggggaagcaaggcaggcactgatcttgatgacgttactggaaataccaaggaactcatcaaacgtgatacggggtttgtagtaaaagtggtcgccctgatttgatcggctgatcagctcgttcatctcctgaagaccagtgtagtttttggcaatcaagatggtgtggtagttatcgcgtaccttattctgctctccggtgcgtggatcggtaagcaacagcttttcagtcaaatagacttcgcagccatgcagatatttcaatccggccttatcacaggccatctttttggcgacccactgatagatgttaccatgctccgtaaaagcaatggcagtctgccccagctcgacagccttagcgatatagtcctcaaacttcgtcgcgctgtctaacagcgacaattcagtatggacatggtatgccgtatagttaccgctcaataagatcacctccgattgtgccacggcccgtcaaaggtatcgtcaacgcaaaagtttttcagacaatcctcacatacaaggtgagaacacgccctacgaactcggcctgtcttatacatagtgccattggcaacctttgtctcttcttctgtaaaccaaacagggatgaggctaccgccacagtcacatactccgaaatccaccatagttagccctctctgtcgttcaccgctccaaatgcttcatcttcggaggcacgctcttcagcaagcagctgaggagggagaggcaaaggctctttgtactccttcttgtcccaagagaaacgacggtcgtactcgtccatatcgccgaagaaacggcgagaggcgggatcgtaatagaggccaacgtcgatattctgccggccaaacatacggtctttgacgatagttacgatcacatcgtatttgagcaactggcggcgcttctcagaatattttgcagcgttctcacgctccgcatccgtcactcgccgcaggccaatagtccgatgtgccaggttcacgatgttgctggttccagcgatatcatagatacctacattggttccggcgtccatctttcgagggtgacaaacaagaattacagctacttgatatttcttagcaaactcaatgagcttcttaatcgtatctgtctgagaacgcagctcctcttcgctggtttcagtgtcaatacacatgaagttatcgaggatcaggcaacgggcaccgtgttttcgcacggtatccgtcatagagtcgatgagcttatccagtatgttgtcgtagtcgtcacgatagatatgccaacgccctttataggtcttgttgatctcggcaagcgtcgtcgtggaaatcttcttgtaaggattaccccgacgagagatcgcatctgagatattgcgggggccggcgaaaatgtagttgaaccaagacttttctacaccgttgggaagttctccactgaaaagccatgtaccgatgtcattatcgagagagttacacgcgagctgagtaagaagactgctcttaccagatccgggttgaccactcacgatagtaagcgttccaaaaaagagccgcatcagctcatcatcaatggctttcagcccggtagtcacaccgtcaacatcctcatactcggtcggttcaacatcggaaagatcaactacggaaggaacaggagagtccttagcgtccaaaatcagctctaacaccttgtctttcccgcagacgtaaaggatctcattcaggtcttttgttacccgcccagtatttccaatggggattgccgggatatctacaacctttgttcgccagctacccagccgaggaacgcactctttctgcattttcacgccggcatcatcgttgtcggcgcaaatgataatgctgtcaaactgatcgagccattccaggttttcgtcgatccagtggaggtttgaactgcccagagggacagaaacagcatttttgaatcctgcctcaatcgcactaaggcaatccggctcgccctcacaaatcagaaggggagaattaacgttgatacggttcatgttgaacagcaatggagccgtatcagagttttgctggcaccagcattttgcttgaccatgctggactttatgcgacggtttgtatttcaccatcgtcaacacgtcgtttgtgtcgtagtagttgaatactgcgtttccctcggagtcctgccgcacatcgagagcatccagcgtctcacgactgatcttacgttgctcgaaatatgcgtacactttggacttatcagtgcagggaacctcatggggatacctataatgccgtttggttttcacacccagctctccgaaagagtagggcatttcagcaagctcgaaaagtttcctgcaggcttcggcataagttgcgcctttatacatgaaaacgtccagaatgtcgtagctacggccacaactaccgaaacaacgaaagttgaatgctttcttgttgtaaatgaaggaagcgtgatcctcctgatggaaggggcagcaacacttcatgtttttctcatcgaaatcggtaatccccagctcttcgacgatgatttgagcgttacggtctccgagcttttctttggcctgcaaaattgtttctctatcaatctgcacgggtaaaatcacctcagttcttcggtaagcccgcccacttcatgtggacgggtcttatccgaataaaatccgtctttcatttgccgttcaagatgtggatagcactctcggcctcctcaacaccgagtcctcggcgcattaccgtctgaacccagtgatctttgttcggctcgatatctgcccggtcgtccagaattacgaagtctccgacctcgctatgttcttttagccagcagtcaatttccatacctctgtgacaggatggcagctccggcgtaaagccgtaaagacgaatcccgtatttcaacagctctgcttccagttccagatagtctccgttgtatctcgggtcgtctcggtcgtatctccaatcactggaaagaacgaccttagctcctgtcatgttaatgatgtgcttcaggttcttcatttgcctgttgtcaacaaacgtatagccgccttgggttttgcggactgtacgatcactgttgagcacaccatcaacgtcgaggaaaattaccttgatcttttccatcacttatatccctccgtaacatattggctggaatgctcgcaatgctcacgcacagaacataggtagtcacaaaagaaacgatcaggtttggcaggaaaattccttgccttatagatgtcgtcaatggaacgcaggaaccagtctatgtcctcctgagcagttacgatgttgaatggctctctgtccaagataccttcgcggaacttgttgaaccaaagttcacgcggccactcaccgtagacctctttgacccgtactgcatacaagttcagttggcggagatatttgcggcgttcctctctggatttccatttgccccggcttttgtgatcgcaaacaatcagcccagacctattacgaagcaccaggtctataatacctaccactggtctgccgcccagtgtagaggtataccgatcttcgaccgcaagcactttttcttcgtctcccagttgtccaccgaaattatcgaagtattccataccgcgctcatagcagctatcttccagtcggggaaatggaaaccgttctgtaactgctcttgcgtattccttctcatagaggccggataaatcccacagctcgacctgctgacgaaaatatcgctctaaaagcgagtgcgccagtgaaccccattgagcaaaagcgttgtccacgcgatccatgcactggaggtaagtaaggtcaaacatacgcgggcactgatcaaaactgctaacgcgggagtatgaccagtccatagcgtccaggagaaaagaattatccatcagaagggcagctctccatcttcctcaccgatatttgcgaagtcgctgttctgagaagaagcggtagcatatccggtggtgggggcagaggcgttgtcagaagtctcgccgtccttcttggaatcgccgaaatagacgttctcggcaatgatgtctacggcagaacgcttgttgccgtccttatcggtgtagttgcgcttctgcagccgaccgacaacaacgatcatgcgccccttgccaaaatacttgccaacgaaatccgccgtagagcgccacgcagtcacatcgaagaagtccgtctcgcgctcattgttctgcttgttcacgatgtcgcggtcgcaggcgatagaaaagctgcacacggagatgtcattgtttaccttcttgatctcaggatcgcgggtaagacgacccataatgattaccttattaagcattgtgctttacctccagtttcttgatctgctcaacgactttctgagccgttgcgatatccttgatagcgttggggttcttcacaccggcaacactttcgatagccttgtagatggtgtctttggacacaccggcttccagcttcccggcaacaacgctcaggatctcctgtttcacatcatccagatcgtcttccttcttcttgcgggcggcgctggacagctcctcacccgtccaaagagacagacccaggccgtgcagagcagcacacttgaccaagcagcgcttgatagacttctctgcatcggcagaggtgatcgtgtcgatgggaatagacttgttacggaaatccataacagccagagactccgtttcagtctggtcgttgatggtgatagatacctctacccaggcggtctttccgtccgtatggtaaatgcagccgtcagcggccttgttgatggtaaacttggcactggggaagagggacttcacgatcatccatgccttagaccaaggcaggtagacgatcttatccttcttcttgaggtgttccgtgatatcgtactcgttcagaatttgaaaaacgcttttttccatgttagcctccgttgatttactttgttgctaaaccctcgacaagataggtagcctccatatcagccaaatgcgtcatgactgccagcgggtaagtttcaaaagcattgcccataccgtaatccccgcctttgactgcacaatcaaagctgcccatatgccagcggattgcaacaatttcgtcacgtgtgagcttgatgaagctctgcaggatgatgacagatttctcgccatgaccaagcgggagacgatcttccgttttgtagaacggctccttatgccatgcgcccgtaacatcatccttgacgttccgagagctgacggtgtagtagttcaccttcgtcagatcgtggaacaacgcagtgaccgccaccgtctccggtgagatctccagttcaggatagcgagccacaaacccagagagcttgtcatacacattgaggctatgctccagcagcccgccagtatagttgccgtggaagcgcgtgcttgccggcgcagtatagaagtcagaacgttccaaccacgccatcaggtcttccatacccggacgattgatagtagcgcaaatttcaacgaaccgttttttcagatcgtccaaatttgcgatttctacattcactacatccatattgaccactcctttattatgttggtgccccgaggaggggacaacacccctcctcgtaaggcgcaggattactcttcgatgattttgaagaacacgtcggttctacggttcaggtaagcatcggcagaaccgggatctgcaaccatcttcgtgttaccattgccgaccgtaatcagacggttcggatcaataccgcaagcgatgaaatacttggcgacagcctttgcacgttcagcagacagcgcctgtccagagtcggagtagttgcgggcattgatattgccctccacttggataatcgcgccatccagagtattggcgatagaaacgaactcatccatgatggcgtatgcctcttcggggttcttgaactgagcggtatcagccacaaactcaacggtcatggatttggtcagcagcgcctcataattgacgatttcctgtttctgctcctcggtcagctcaacgggcttactggtagaggtagaggtagaagaatacttgcttgccagagggagcagatactggttatcaaagagtgtcatagccaccttgcgattgaccgtctcacccaaagactcccagatatcacacatatcgaagtagacagaaggagcagtggagtccagcacttccttattctcggcgtagcccatcatttcggcatcgccgcactgagccttaatctcctcgtcggaaacgccggcgaacataggcatgacagaacggatgtagtcaaactcagtggtatacattgcgttggcctggaagataccatcaataaaggcggtcacaacgtcggggtgtgcctgggcaaagtcggaacggaatacgataccgtccataatcaggctcttagaggctgtggtagagaacatgatgtgcgcatcgccgttttcggttgcataggacaggtaaggctgccaagtcgctgccacgtccagctgaccggcgaagaacgcctcgcccgtctcagacgcatcgtcaaagaggatcatattatcaatgatagactgcttgtcagcatcggataggtcactcttattaacaaaccatgccacaagtgtctgggcttcgctgaatctgggaacaccgatcttcttgcccagcagatcatttacggtattgataccggacttagcaataatgccgtcgccaccagcagagtagttggtaaataccggcattactacatccaatccggcctcctggaacttaccagacaggaacgcggtacggttggtggtataacccgcagcattcagctctccggtaatcaaagcgttgctgctggcagttgcgtcattgatgatattgatgttgaccttaatacccagctggtcgaaaattgaaccaggctgcgtggtcaagccctggttagcgtcgataataggcttccagcctacccactcatccagagacaggttaatcacgggatcagaggtgtccgtcttgccggcggagggctttgtcgtgggcttctgggatgtgctgccagactgggtacccgaactgatgggtttgtcgtctgcgatgttgttcttgtagtagttgtagccgaagccgccgataccagcgaggagcgccagcacgatgacgaagatcaccacacggccagcggtagtgagtttcattctcttcatggtaagttacttcctttcctctttcactttggatttaggagcgtcgaaggtgacgccagaccgtggagcctgaatagccggcttcccgttatactttgtggcgagagactgcaggtaagcatccgactgagctttcgccgcatttttctcagccattgacattttggtggtggtacggcttgcgtgaacgacaatcgcaccatcaacctctttgcgaagatcctccgctccgtcccggacactgcccaagagcttatcagtggcagagtcccggcgcagttcgtccagatcgcccaagagatccttcatgttgccacggagtttcatttcctcgacagtcatacggctctgctttttcagctcgcggagcttcttgtcgtacgcttcataaacggtctgagcctcttttaccataggttcaatctctcgcaggtatccctctttctgggagatttcaaacaggatttcctcacgcctggttgaaaaaatggcagcatcggccatattgccagatctgaccagagactcacactttgattcaacgtccttcagttctccatatagcttgttgaggttcttctggacggaggattgctcgcccacaaaccgattcagggtgtcaccagccttgttgtaacgctcctgcacttcctcaatggcttgctggaaaacagcctttgcaccctcgggtgtcttggcgatatcctccacgaagatgttgaggaaccctccaacgaggactttcagcttaccccggacaccggggaagatgatcagggcgagcacaaatacaaccgctaccgctccaatcacaatgcccattactgtgctccttccttaccggcaacgccgttcgcaaactccacgagttgactgatagcttctttttccttctggatggcggcgctggaatcagaggtcttttgtttggagtcctcaattctggcttccgcctgctcgatcagggactttagatgttcgatatccgcctcggtctcagcgatcagtgcgtcgttttctgccctgatactatcctcggcagcgtccaagacgcgaccacgtttcagaccgtcctcaatgagatcatccacattgatcccgttgacgctgagaatgccagcgatggacgcctgtttcttggccttagtcatatcctggggcagaatgtcgatatacgccttgatcttgaagatcgagttctcgtcgtcgatatcgccctgctgatagattgatgcgatcacatcatcataggacacctgagtagcgtcaattaccggcgtctcaggcgcgtacataggctcggatacgggttgcatagggatttcaggcataccttcgtattcggtacgaaccagtcccatgcgttcaaataaacctgccatggtttgttacagctcctctcgtttcaaatttgattattttatcgcacattttgaacgcctcgtcctggctgtgcgttaccataatgattgtgttgcctgtctcagcatggacatccaaaatcaatcgctgcattttgctacgggtcttgtcgtccaaggcggataacggttcgtccataagtaggtatttcggcttgacatacagtgtcctcgccaacgcaaggcgctgttgcataccacctgatagctgagacggccatttatctgcatactgctctaacccaaccgctgcaagtaccttgatagcgtcatcgcggctacggagttttttatcccgttgggcaatcagcacattctccgtgcaggaaagccatccgaagttggaatagcgctggtgcatcatgtacacagggttcttgtcggcgttccgataggtagtgccatcaatgacaacctcaccatgaacagggtgaagaaggccagagatggttttgaggagggtcgtcttaccggcaccagacttcgccaaaataccgtaaatcaaaccgtcgtcaaattcctggtcgatgtgctccagaattgcttcgccgttgtacccaatagccagatcattcaacttgatcatcgcagtacctccactggaatatctttcggatcagcaagttccccagcttgtcaaaaacgaagctgaacaacatgattacgatgattgccccgaacaccacggcggtacggcctctggcggagcttacattgatgatgaagcccaagccgtacttagcgttggttgcctctaccacggcgcagtatgtccagccaatgccatacatcataaggaacgtactgaatattgaagggagcgatgcggggagcaggatttctttgattgtctcccaactggtcattccgattgtcttgcccgtatccatcagatcttgcggtacgtcgttaaagcaaagcaggatcgacggcagcaagtagacaaacgtcgcaataaataggaacgaaattttcatctgctccccaatcccaaaccataggatcaggagcggagaaaatgcggttacgggaacataccgcaggaaggaaacaaccggcatgatagtttccttgataggcttcacgccataaatcagaagggagaggggaattgctaccagcatagaaagagcagacgcaccagtaatccgcagaaaagagtaggcaagtcctttttgcaactggcctgtctctgccaacccgacgattgcttcccagacggtagcaggggcggggataaacagcggttgggtgaagcacgaggccacataccagacggcaatgaaacaggccaataaaaccgttccccgtatgcagtttttcgcacgccgtttgactgaagttttcatttcacgacctcttctcatggatcgtcttcgcccagcgacttcatcatgaagcattcatcacaatagcagtcgccagttgtttggattttgacataatcgccgactatcggttctccgcaggcatcgcaaaggatagtacgggcataagctccgccacagtaaggacaaccgctgaaatcctcatagggcggagaatctaacccatggcgttcttcccatcgcttcggatcgtcaaaggttttgccacagtccagacaggtgtattcaccatacatcagcgcttcaccttccagactgccgtattgcacccagacttgccaagacgtctgccgacgatcacaaccttgccctcggctttcatctctgtcagacgaggccgtgtgaagttcggactgttggtggggattttgccctcagagaccagcttctcaccaatctcgtcagcagtcataccaccaggatcaccgctggtcagaacatccagaatcatagccttacgattaggacgcctcggctcgatctggtcatatgcttcacggcggtttctcaacgcaatgctcatatgaatcacctctttctatccgacaaatgccggtttctgttgcagtgatagttggacaaatccaaccaccttcctggactcgacctcttcgagttttactggacgggtaagataaatccgctacccccccacagcacactcgatataacctttttgggtggcctgcttaattctgactttctccatggtcaacctccgggcttctcagagcataccatccagtcttggctccgccccctcccgcttcggctttcaaagcacgtgcaatggtttcgccatcatatacacgattggcgtctccattgtaatcattgatatatccgagctgcttcagttcatcattcttatcagaataatttactttgtcgctaacatcggtaatatcaaaagtagacagtgctttttcaaatgcgccgataccggaaaagaaagaaccaacagtcatatcttcaaagagatacggcatagcactgtgaagttcatccaaaatggcacagagaacgtctaccacgatagagtttccagcctgcttgtaaagctgtgacccgctcctatctgctccaccatagatattttcgttcatggcggatttggcacgttcaaagtcctgatcttggaaacccattaaacgccaacactctttttgcgtaagtttacggacacgaaaactcgggcgtattgcgataggtgtttgtccgccgcccataccagcggcactatttatgcatgggcaaataccatcgtttcttggagtctggtgcttttgtaagccgccaatcattgtgattttatcttctgacgtaggacttctttcaatcactctcttgtcccccccccatcaatggtgcgaatagtgccgcagacattatctttgaaaaaacgcacaccttcatcgcatcgacgctcacatacgattttcacattagcttcctcgctttcatctatctcaatcaatacattgtctttttgaacacccgtcaaagtgttggtacacatattagggcgaacttccaaacgctgtattatcttaccccccccacatatcttccacgaattgcagcggggataatatatcgcttactcattatgctccataactcctgtcatttgctgatttccaaagcccttatagtcacgggccagcaaagtcaaggccgtctcacagtatccttcaaactgggtgcctttcttactcagcttcacaccggcaagtgagcaagtcccagcagtggtggtctgtggaacctcttccgctggtgcggacggtgttactgatttgtctgaacgggggggggttatcatggcagctaccttgtcatcaggcaggtagtatcgctcgtcaaccttatcctccagcatatctaccagcgcttttttcaaagggataggagacgggaacttaaacttcccattatctaaatccttacgaatgatgacacagtaaacacgctcacgattctgggggattccgtagtgttttgcattcagaacctgccagtagacgttgtaaccgtagtcttccagctctttgacaaagaggttaaaagtggcatagaaacgagaaccggtaatatttttaacgttctcgtagatagcgaagcgaggcttcttttctcttaggaaacgcagccattcgaccagtaaggaagagcgggtcttctcgatttcagttgatccgcacttagggcaatggtcgcgttgatcatagtgagcttccaggggattatatacgtggccgcaatgcttacaagtccatgcagccccccctgtttgcctgctatgctgaaatcctggttattccgaattcggaataaccaggattatgccgaggaaatagttattccgaagtaatcgctgcaaaccctgtagtacaaggcgttaccagcaaaaacttcggaataacataatcggcatatatagaacaataggattagagcagaccagataacttcaaaatcatttcctcgttatcagcccaaatctcatccggtacgggcttggttccgcggacagcatcagctttctgaattgcggcacgtttcatctctgtatctgcatgggcatagatcatcgtcgtctcaacctgtgagtgaccaagatattgagacagaagcaccatgggcatcccggactgatataagtgcattgcccgtgtgtgccgcatcatgtgcggatgaatgtgttctgggacttccgggcaaacgctctttgccattcttccatattttgcaaagaacgcggctaccgtatcgggagacattttttgctgtgtcccatgaatcaccgtgaagaaaagtggtgcttcactgtggcaatctgtgctcggatgaaacttgcgcagatattgcttgcaatgctgaaccgttttactgagcagtgggactgtgcggattttgcgcccttttccgtgcagatacgcaatcgggtgttttgcgtcaaggcgcagatcacaaactttcatatcgagaagttcactgcaccgagctgcggtatcgtacatgaggatcatgaataccagattccgcaaatctttgggcttggatgtgtcaggctgctgaagcagtgcagtcaatgacggttctgtcagaaactcgacgactcggccatgcgcctcttttgagggaatattgcaggcagaaagatacaacgctgtctgcgcacagtccatctgtccggcaaactccaggaaagagcgcagcgccatcaagcgctggtttctggtactggcgctacatttccgcacgttttccagccaagtcaggaagccaagaatcgtatcccggtcaatacgggaaaaggtcaattctacagttgcaatgccctttccgtcccgcatataggacacaaaaaggttcagcgtctgtttataggagagaatggtattttcgctgaggcagcgttgtttgggaagatagtccagcagaaagcgccgaactgcgtcaaaaaaatcattcatcggttctcacctccggcaagattgcctcagcagaagaaaatgctaagccggacatttcttccagtaaaccgggaaccagatgaatgtaatagtaggtatccgagagctgcgcatgtcccatgtacgcgctcagatacggaagcatggcatttaaatccttgccctcacgcatccaatggtacagccggtgggttgcaaaagtgtggcgaaaatcataaaggcgtggggaacgacgtccagttccgtcaataccggctttccttaaagtctgacgaaaggtcttttccaatccacgtttcccataatagccgccctcagcgttgggaaagaacggctcacgctccggcataacggcggagacaacagcattacaatccgagagcatttccaccacatcatccgccatcatgactatgcggcttctgtgctgcttgctctccataatattcagcctccctttgtccagatctacgtctctaacgcgcaaccgcctgacctccgccggacgcaagccgcagcaatacagcagtttcaccatggcaggaatcacaaattgccgtactggaaagcccccgcgcggtgttaagtggtcaaggacgttccaaattgccaaaatttctgcctctgtgtagatgtacggagcatacggcgcatcttttcgggcaatgtccggcggcaggatgtaggcagtctctccattgcggttcaaataccgagcgaactcacgcaccggcatcatacgattgcggaaagtattattgccctctgtatccttttttgtggcccaggcaagacagatttcttctgtcaggaaatcctcatccgggaactgggtcaggcaaaagcggtcaaagtcccgcaaaatacgagaagattccaggtagccaaatcccaacgcgtttttctgtgagataaaggcctcaattcgggcagcaaaatggctttcaaaagtgtaaatcatctgctgccaccagactttccctgagaaagcagaggaagtgcacacaacttcagaccctgctcgtcaatggacaggtacggctttgctgaatcaatatgagtttggcccagcatctgttggatcaactcaattggcacttcgttctggagcagatttgtagcgaaggtgcgccggaaactgtgaaatccgcgatacccggaatgaattcctgcgcccttcatgtatttggagacaattgcacntcgtcaatggacaggtacggctttgctgaatcaatatgagtttggcccagcatctgttggatcaactcaattggcacttcgttctggagcagatttgtagcgaaggtgcgccggaaactgtgaaatccgcgatacccggaatgaattcctgcgcccttcatgtatttggagacaattgcacttccggttcgacttttcaaagcacggacagcgccgacgtgacagaggaaaatttgcggtagtgaactcttggggcgcccatttaacaagtaatctgctatagcgttgcctgtttccggttcaagaggaattacgattggttgtcctgttttgtgctgaacaacacgaatttccctcgttctccaattgatgcagtcaaatgtgagccgtatgatgtcgcaagaccgcaagccgctttgcactgccaaaaccatcatagcgtagtctcttttcccgaccgcagatgtgatatctggctgagaaagtagacgttccaattcatcatcggaaaatccttcacgaaagttcttccgagggcaaacaaattccgggagtgttttgcaaaaattatccgcagtgatctcggcctcatataaaaatcgcagaaaggtccgaatgccaaaaagagcagatctcattccaccagtgtatcgtccaagcattcttgtaacgcatgtggtaatatccatcattgcgacagtttcaatggagactattccatggtcctctaattcaagcaaaaatacacgagccacacttgtaactgtgctaacggaactttcagcccagttgctctgcgttgtgacatgcgcactgaatttatccagaatcgctttgtgctgaggaataacttcgcgccgtccccaattaggaatcctttccagcgtgattttccctgtcaggcggaactcctggagcatcgccgccgctttgcgcaaattctgataagtagttctgccaacctccccttgctcatattgcagtcttcgctcatctgtaagctgggatataagtttgtctgagtaactttctgtaccagaatcatagtgctttttcaaaatgacggctaatccctcttccgtgtaatggcgaaccgtattttccgaaaggccaagttgttccatacgcttgttgaccatccagacaagcacataaatattttccgattcggcaaactgtttcgccgtcggtgcgtcgtgttggatgatttgctttggacgattccatacagggtcccatggctgaaggtcaggcaaatcaatagaattcattgcagcacattgtttcagaagctcacaactcctgcggacaagtccccatttccattgtgagatatctccttggtccaaaagcacgcgttgctccagcaaaaaattatcgagcatttctgctgtagcatatagtatgccttttgtgtgaaaatgtcgaagtatgctgccaaagcctgtatgagtatagtcgtatatgcttccagcactcatccccgcattggttaacaactccagggcacgctgtgcagttgcgtctaattcaatcagttccataggccctccttatattttgtggtgtcagacggttgtctgcatgtccacattatataaaatgaggccnatgcttccagcactcatccccgcattggttaacaactccagggcacgctgtgcagttgcgtctaattcaatcagttccataggccctccttatattttgtggtgtcagacggttgtctgcatgtccacattatataaaatgaggcccgctttgttattccgaagtttttacggagaatccttgttttacaagactctatgcaatgacttcggaataactatttcctcggcataatcctgacacggacttccaccgaacatgacattgaaatccggcacagccttctcatcggctttggtaatatctccgatgttaagggtgggatcaacaccatgaacggcgcaatagctttctgcggcgtaacgatcgaactcgcagaaaagggcagtttggtaatccaaattagttcctcctttgttggttttctttgttgctaaacggaaggttgagggatttacaatctccctcgaactgcttttattctatcatactgtctccataaagtcaataattttctttgttgctattatgaggttttttgaatttcttcaaagataatctgctttggtaacattcctttgcatacatagacactactgaaaggcgggtttagagacggcttttggtcggcgtagttcttaaagtaagatacacgccgattgagatacatgatttcaaaatcatgctcacggaacatcttaaagcgtttctgactctcgaaaagtccgacgacccctaccaacatagcaaagggtatattcaactggaatagccgctcaaacacttcgcctttgagggaatacggaggattactgatgatgtagtcacacttcggtgggtcaatagcgaaaaaatcctgaccgtttgcaatatgtgttgcgataacggtatagccgcgttgccgaaagagctttacaaacagactatcctcagtgtcaaacggacaccaaattgtcacggggggggtggaagatacttgtacaacggggcaatcgcatactccggtgtatagaactcgtcgttgccactgccggcaaccttatccatcttcatagctgcacctcttgatttactttgttgcaaattaaatccaacgaatgcaaggttcgccggtatagccatgttcccatacgaaccaagcgaagcacatggtacttgaccagggcttaccattttcgtcaacttccaatccgtttctcaaaggattgacacgttttgaaaatacatacacggctttcggagggtgggtggcaaagaaatccttacgttgccgtccttcgagaaactggatcttggcgaacaggatcaccttgccagtggatacctccagagctttctcagcgaactctttcgccaaagagaacggagggttcgtgatgacgttgttgaatttttcgggatagttctcagtgaggaaatccaccccgccaacaataccacatccgaacctatcatctctctgaaccagatcagtagagataatttgactgttgggataatgttcccgaagcaccttactgatatgcccttcaccagccgcaggctccaaaatggagccgtgcagctcttctcggctaaggatggcttctgtcgcctcgaacggagtagcatagtagtcgttctccacacgagagcgggtaggggacataccggccaaactggtgccgctcaaataagtacgctcttccattttctcaccgcctattaaaaaattgtcgttccgtaggcaggcataggattgagcttgtgaaggttgtgatcgtgcatagaggcaatcctcttgtcgatttcctcaattccactggtgccatacatgatgtaagcatccaggtgagcataagtaaatccaagattatcctcatcagtttttccacacagcccatcggaaggggtcttgcttatcaggttgataggcagaagaagctcgtacccaatctggacgacttcatgcaccatcagattagcgagcgggctaaaatcgccggcgctatcgccaaacttggtagagtatcccacatagtcttcagagcggttgcaggtattagcaacacgtccgccgtgaggcaacgactgagaaatagcatagagggtcgccatacggatacggggagggaggtttatcctcgtctgatcgctgacgttcatattgagcgctacttgatcacttaccgcagacactgctttggagatatcagtataggcgtatctgatacccagaaattcgatcagctgcttgctatcgtccagatcgggctgttctccattcggcatcataacacccactacacgctctttgcccagtgcctctacgcaaagagcggcaacaacgctggaatctttaccaccagaaataccgaccaccgcatcgcagccttggccgttactttcaaagtaggaacgaatccactggacaatctcatccttagtacgctttgggttagctaacattgtggcacctcttttctcaaaagtttccctcatgaagattcttgcgaacctcatccagggtataaattctcaggagcttgccatccttgaaaactggcttcagccagttcccaatctgcgactcctcccaagtcaaaccgtcctggcagaagaagttgtggtacgtatagtcatatacaaccttacagcagccgcgctgagacttcttgaaatgtccactatctgtcttggggttcttaaaaatcatgatgggctttccgtcagcatcttctgcataggtcgctttgactgcgataccaaatgtatcacgggtgtacggcgcataagtcttttcgccgccgtccatcgtctccagacactgcatagagaaagaaccgacgcccagagaaacattgttgatagcgaagccatgctccatcaggatcttatacactgcctcgcaccgctgcggggtaatgctatcgccatacaatgccttgacgtgtggatcaagaactttgtaacccttgctgttcacggtaccaccaaaaatttcccacagtttgaacaccgtctcggttacaatctccacggggttgccgctgtcgccgcgaatagcaagacatccatggtgctccatcacatcctctttaattgcggggagaatattattgaccaggttccaatagtcatagctgtcactgaccatagagaagttttggtacggatagatttctttcagtagacgccgcacgtgtgtaatctcgtcgccgtcaaccgcatagttggagcacataacactgtgctcagtagaaagagcaccataagctactgcgtcattctccactcggcaggcgtagttgtgttccagccaaagaatagccggcactgtagcagtattaaggaagctcaggcagaacgcagcagaactcttggtggcgctctccacgctttcctgaccacgcatggaaaagtcgcccagcagcttggcccgtaccacatcatcatcacaggtaagggcagcgtacttattgacgatctgccggtaacgatatccaacttccgctgaaatctgagtatgccacatggtacatgacaacattgtttcgatagagttgaccaaccacacaaagttggggttggtattcgagatctcaatttgtggaacatgaatattggtacgggttccttccggcacggcccggatttccagaggcagataccccaacttatgaagcgccgccaaacgctccacaccaacgccgtccgtgtcgatggtgttattcagcacccgcttgtattcggcaagcacctcatccaatgagcgatcaaagaagtgagtattgaatgcctcgatcaaatactcctggataaatgcctgaagaccgaacattgtgaccttctcggtatcagccagccgtgtcatgcgcggggtgtaataagacaccatcttggtcagtgttgcggggtactgctctgcatgggcagtcttgtagaagtccaaacagagcaaaggactgtatgaaatcattgttttaccctcttttcataatcatctacaaatggagatcttctcgtgatcaacacggaggatgctatcagtggtgaatacacgagagataagaccatctgtcagcacagtgcctttcaggatcgtattctcacagtgggtaacatagagcatgacttcctctgcgccggcttctttcagagccgtggcagtatgggtaaatgtcccgccgcgagagcagatatcgtccacgatcagaatatttctgccgttgactttctcaggatctgtcagctccagccgctcaatcttgccggtgcgccagtcacgatgtttaatgcaaaaaacatactccataggaagaagctcagagtatcgtttggcagcaccttcatccgggtagcacagcagaggattcagaccctgactgaccatccactgaattgcatagtcgatgtaatgcttcacatccatagtctcagcccggtcaatcagtgccatagccacattagagtgagggtcgagaactttgacagactcgaacccaagcgaattgataaactcagcaaaccacttgagcgtgaacacctcatcgcggttctttaccctgtccatacgggcgttggggatatacggcatctccagatagaggagcgggttgccagcactcttgaggtgcttcaccaaataccagagctgcatacactcggcatcattgtcgtacatccaccggatgaaataagcggacttacccatggcgaaaaacgtgaagtccagcttgggagcaatgcgaatcgaagatgtaccgtcgggaaaactggcgaagtcgatccttctatcgtcaacaaaaatcatttcagacctcccagttctccacattgatctggcacgctttcatagcagccagagcattgttgtggctcaccggggtaacaccggcgcagcaggcagcgtcaacggtgattttcgtctcaggcagaaacgctttgacgagcagtgcgttagagataacgcagatgtcggtgcagagtccaacgaaaacgatctcttcaatacgctgcttcattctggcagaaagttctaccaggtaatcgcccagctctacagagccaaacgtacccttctggaatacggatacgcttttccccgcgtcgatagccgcatgactaatggccgtggcaatgatatcgtcgagccgccagccgtgagtcccctcaatgcagtgctcgacaggaagcagctgaccttcttgggttttcaggtagtcggcagaacgatgggtgtccttggtaatgcaaatcaggtctccgtcaaagccggaaatctttttggcgacatctccaacagcagcctgcgcctccggggttccgagcgcaccattgatgaaatcgttttgcatatccactattacaagaatcttcatcttaaacaactccttaaaatgagcactcacacggtagatcatcgtcgtccttgatgagctttcgtgcagcggcccaaaatgtttgaggtttggctttttcagtgggcggcaacgccttttctttgagcttggcaaattccgtctcaaagtctgaaagatagccttgtttgagaatactgtacccgattgtgccttcggccaacttcgccttttcccatatttcaggatagaggcaataaacaacaaaccaatgttgtttgccggctttcaaacacccggtacaatttgcatgattgaaaatgctgtaggtcttcggacgctcgatcccaacctcctcgatgtcatggatagtacgtacctcccatgtcaaagggtactctgtttggtaccccatcgcggccataatgccaactctgcgccgaatacggtgctgttcattggcgtcaaagccatagactaatgagatatcgtcccttacttcgggaggatttgcgggatagtgctcggacagccatttatggaaaggttcggttttcagtctgttggtgcaaaaggcggtggactgagcgccagccttaaacgccttgatttccatacacacgtcgaactgatccttaatatcccatccgggcatattggcgtaagtaatgggaacgcccagataatccgaaacctgttttttgaaacgcttgatatcagcgtcttcggttcgaggacacaaatcatgattgagcaagatcgtgtcctctgctccgaactttctaactacttctacggcggcaatcgcagaggagtgaccgccagaaaaacaaacgatgtgcttcataccgaccacaaccatctcggctgaggtcaaccgtctaatcctcccttgctaccggccagatggctttcacgctgtaacagacggctttactctacacttatcaatcttgtagaaacccggcttaccgggattggtattagctcctttctgaatttgaattattttcgccgcccttaaaaattgcatggggcagcggaataggtttttgggtaaaatatactgtgttgaatttcagatccataccgactccttctttgcaaaacgattcagcaatatacttacggtaagctgtccgatccgatttacataggggcaattaagccggtcaggatgcgggacgctgtttcccaggtcaataaccagatcgcgggtattgtaggaaatatcctgcgtgataatcggagttgcgtaaatcaccacatcccggttctgcgtagcttgcaacaggctttttgttttggaatgtgctactgtaaccgtcgcgttgttaaagtccagatacttcgccagttctttaacggcgtgccctcggcctacgatggtaatatccttctcccataccaatccagactcaattagcaaatccatgattgcttgagagaccgccgacattccgggagaataagagtggtcaatatccacatcaggatcgagaatagagttgaacgacactgtttcactatccacaacaatccctcgatagggagggagagggttggacgtatgatcacagttgataccaagctggtctgccttacgcttgatggctttcaggaacacgctatcctgagaaccaagcagaagcagcttgccggaaggatgtaggcttgcagtttccgcatccaaagcggcggagagttttttgatgttttccattacatcaatcataaggcgctccttttttatttgtattattctaccggaataccaatatactcaaggacttgctgcatacccaaaccatgttcttcccacggtctcatgcagtaatcccagagctttgggtgcgtgatttttagacgctggaaacggtttggagctttttcaaggtgagcgccaaaggcacaaaagacacagccagtacgcttttcgcctgtcgtcgtccaccccccccatcagttctgacgatctcgccataaactgaagcgtaggggacttgataggtatagaggtattccagcacatcttcctcagtccaaaaagacatgggttgggagctgggcttcttaccggaaaaagcattacatcccatacgcaaccatgtggcacgccgagatctgctctcgtttgccatagttgcaataataggtactcgaccagtttccttggagtatttcttcataggccgcttcttcatgacagtacaacaccgagaagaaaccttgaatggggcatccaacagataacaccatttttcacagttgaactctgacggcgttccgttgctccgcacaatctctccatgcagctctttccatctgaaagaacctggcttatgcccatattccacagtgtcagctacacgcttcgagacaacgggatatccgtacacctcaatgactttacggaagttcatctcaggccggacaatcgtaacgttttcacagctcttaacaaattctctgacttccgggaactcaagcccggtatcagagaaaacagcaggcacatcggggtagatccgccgcacaatatcgagtagtacggtagaatccttaccaccgctaaatgccacatagaccttcccatcgtagtgctgataccactcgatgatacgagcagtagtgatctggattttgcgttggagaggcaggcgctgcatctcttccaactcttctctgctatgcaaagcacccacctccccggttccaatgattgtcgtcatcgccgcccaatcctaccgtataaatcagcaccagagccaaaagcagtaggatgataccgtccattggttactctgtggcctccggcagagcagggacgccggcatagctggcacgagccagccactcgttgatgaccttgttgaaagtattgtcgttgcccatgtacttcttcagcatggcagcagtcaggccggcttcggcgctgaatgtatcaccgggctggcatttcacaaccgtcttatcaccgtcatcccagaacacgatggtagccgggttgtggaagatcacattgacgggcatcggcagatggcgagaagcaggctgaccggcttggagcttcattgccgcattccaaccgttggagaaaggatctccgctgggagcgagatgggcaacaaagccgccgtccggcatacacaggccgctcagaagctcatcaacgaaccgttcagcagttaccggggggggtgccataacagagatgcggggagcgatgtagggagtgtggatcatgtcgggaatcatagttatttcctcctattcagtgtgcattgcggtcacaggcgttcaacaccatgacctggttccagatatcattaccaagcagacgtttgattttgctaaccgtcttactcggattatctgacttttcagccgcatacggccacatatgccagcggatcagcagcgccacagtaaggcgctggttaggactgagatcgccggtatagcagaagctgtcataagctcctacacgctcatgatgatagaagtgggcgatctcagtggggttgcctttgatgtcatgaaatactttagtcttttctttgccaatatcgtgcaacagcgtggcgcggagcagagcagcatcggcacctttatagtggctgatcagatactgccatgccgtcatagagtgctgaccaaccgtgtactcatggtgcgggttatcatgttccagcttggagagacgaagcataagggtatcaatctggtcgtggcgatcttcgtcacccacgatcctgatttcatcccaaccctctgccatcatgggaacatcgaatttgaagtacatcttttggattacagactccgggacagaacgttcccgattattgttgcgctccaaacacacctcatagggcgtcgccatgaaaagacatactgtacgcaaatcatgtttgtggagcgctcggacacgatcaaggaatccgatacggcgcttgtagttgatattggttgcgtcgtacaccacatccttgccatccaccagatcccgcaaaacccttttgtgaagggtttggaaaaccaagtcctgttgggtttggtcgttctcatcaccaagaacttcggcacgaatcgcatcgctggagtggacgacggcgttagggatgctttcggcagtgaatgacttcccgctaccagggaggccaaccatcatgtaaaacatcggcatctcattctcctccttggatttcctttaagaaggatcgtttgagaatttcaacggtagccttttgcagtacctcattggcgtgctggttgatcgaaacaggtaccgtatccatatagcgctttttgtcttcggtcatagattgaattgcagtgctcatcagtgcccgtgcttctttcaaagagtagcaaccgcgcttcacctctttgagataatcacactggttactgataagacagtcagcgtaaggctcaccggcttcgtaacgggtcataaactcccacagccgcagagcatggtgaagctgctttgggtcatacccaaatgcctcaatcttgtccattgtggcagggtaggggtgctccattgccttttgcttttccagagccatacccataatgcagttcatcccggcgtagttgttgtatcgggcaatctcttcacgagcgtccagaacaggctggaaaagatcggcatactccgggttgatgatggagtaaggggtgaacaggatctcaacaaagttgacattctgcttcttgatacagtcaaacatgaggcggatgtctttgaaatccacgtgttcgttattctccataatgtgggtagtgctgagaggtttggcgttcaacacgaaatcggaaaagctgggcaacatgattgccttggtgtcaatatcgctaccctcatagtcaaggttataattctgagaaccttgcaggaagaggccaacccagcctcccctgcaatgctccaagacgggcaccagatgttcccgcatccgcgccataatcttctggcgcttctgctcattctggatcaaagtcgtcatcgtcatatcgctcctttttgatacaatcccggatcattctccggtataggcttgagtcgaaccgccccatatctgcccagctttgaagttgttgataaagtcaagaacgactttttcatccattctgttctccaacatcctgagcttcttccatatcaggcgcggcggcggtgtctttgatcagcccttccagcgccttgaacgcaaagtttttatgcttataggcggcaaacttgggacggttgacaatgcggcacacgacaccttcccgaacatgggtatgaccgacaggatcggggccgtcataatactgctcggctttggttttaatccattcaccagcattggttagctcgcaagaagttcctgtgaagatttcctcttcgggaataagccccctatacatcagaggaacatatttgacgcccatctgttcgcaacgatagcgcataaagtcgggcggatactccaccacatcaccgtcttcgttggtcattgtcatgcggtaaacgaaaagatcggacttgggatgttccttaccatcgggagcgcagccatagctgaatgtggtggttttaccgtactgtttggtaaactccttgtcgttcagcttagagttgtttccgggattcatgatgggcgtaccatcgtcagtgaagccaacaacctcgtagtagaccgtctctcccttgtggagctttccttcaaagacgttggcgtgtttttcgcggaaagcgttattaccgtagaagcctccctcatcgaaggtatccagaaccacgcggcgggttccggtaacatagccccaatcatagatgggtgcccgcttgattttggaacgaatcacattcggggtcttacggttttcatagagccgcttttccatgcggttccgatatttatagccctgcaacacaggcagatagccggtacgctgagaagttccgtgcattttcagggtaacttctaccagatctccggcatggaatgcggagaggttgtaggccaactgctccgtgtcagcgtgttcttggaagagcggggagataggatcagaacgcttacgaacatgattgccaccccccccactaccggaggcgcgtttgacggcgggtacgtacttctcgcagatagtgataccgttcaacacagagatcgtatcgccctcttggagcttcttgatatcggtaaaagaagccaaacaggagagagggaggaacagaccgtcgctcttctcgccccggagcttgagagccttaatattccgcttctccgggtcaaggtatccgccagccggagcgccgttctcatccttgcgccgcagcaagtcattcttctgtgcgaactccaaaccgagtttgccatcggtagggaagtacacgcccagctgatcagggtcggtgccgagatccacaattaccgtattaccgaaacattcgccacagagcagccggtcggcattggtatgcttcctcagattgtgaatcctggtaacataggcacagtacattatattcactcctcgttaatttactttgtcactaattaagaatacatggatttcagcttatgagagacagtcacgatagcctctgccgcttcgtgcatctcattaacagtggtattgaaccccattgaaatacgcacagtacaggccgcatcttcatcagacattccaataccacgcaaaacgtgagaggatttagcactggcagcgctgcacgcagaaccagcagaaaggtagatatccaactgatccaacagaagaagcagagattcgctgttgacgccagggatggtcaggctgatgatgttagaagaatagttctcgctatcaccgttgatatagaactccccaggcattcttagccccaaatcagttaagaatgtatctctgagcaatccccaccgtagcttccagttctggaggcgttcagtaacgatttctgctgctttgccgattcctacaattcccggaacgttctcggtaccaccacgcattccgttttcctggcctccaccgataatccacggggatttacggatagaattgctgatataaagcacaccaacacccagaggagcaccgaacttatgaccggacatagagcagaagtcaattccgcagtccttcacgttcatattcacatggcctgccgcctgcacagcatcggcatggaatacggcatgataccttttgcaaagggttccgatttctttcataggattgacagtgcccagctcattatttacccacatgatagaaacagccgtcgaacgtccatcacgaggtaaatagttagactcagcagtatgggcatccgataaaaaacgttccaggtcatttagatctacgctaccatctttgtggactttgatataatggcgatgacagtgcgcagacataggttccagaaccgaatcgtgttccagagcagttgttaaaatcaagtcgccgccaaagttttgcaaccacgcattgttcgactctgtgccaccagaggtaaagaacacctctgagggatcggcaccaatcattttggcgacctggcggcgggcattttcaacagcttcacgagcattgaccccttgggtatggaggcttccgggattgcctacatgatcgggccggagccaagggagcatagcttccagaacctccgggaagaccggagcgttggcagcattgtcgagatataccacgtatttcactcctttgataaaagaggctcagagcgtagacagctacttgctactctatcgttctgagcctccttaatggtttactttgttgcttatgcggagataataggacgaagggcatcgtccacctgctgataccgctctgcgttgatggcctccaacaggcagtcataaggatcagtctggccgctcatcaccatcttggcgatattgggagagaaaccgctgaccaacgcaacacccaaatcgttctccttaacaggaatggtgccgctacgggagttgacattccagaataccagacgaggaatctgatatccggcttccgcataccgctgggcgattacctcaaacaggcggggagtaggtgcgacccgtctgccatatccccacctatcatgggagattgcgccggtggttgcacaaccatcgaactccatatcagagatgataaggatgttcgcgggaagatcgctctgatccatgtgcttgttgatcgccgtagtgaggatcaggtcgaatacagcctcgatgttggtgttggcaacctcgttatgggtagccgcgatccgcagtttctcacgaaggttcttgcctctgctcaaatcgaccagctgaggatgttcagagaaggtgatgtactgatccttgaactgaccagaagaacgctcggcgaagtagatcgccagagagtttgctacttccagcgcagacacatcagtgttgccgactctcactctcatactaccagaaccgtcggccaccacgatggtgttaccacagccctgcaccgtatcggggaggttcttccacagcacttccagattggtgtcggtgctgtcggcataaccgtaccgatgtacgatgtcatgcgggaagagaacagaagcgttgatcttggcctcgcctttctccacagcacccaggaatgcacgtcggcgatcctcgtcgtgacggaggaaagcgctgttgtactgcaggttggcacgagagggaacacgctgatagtcgatttcctcccactgcttggcggtcatctgctgctccacaacaagcaggtaacgggagagattggcgagggtatgctgatactggcgctcggtcatgccgacagccttccgcaagatctgggcataatgccgggtctgcttggaagaagtcttacagcgaggcatccactttgccagaagagaaataggcttgtcctctgccgcattttgggtgtcgtcataaagctgccctttgaccagcccggtcacacagtcacacgcgggcgtatccagcagacaccacagatcgtcccaacgaccgtactcaggcaccagtgccaccacaggggcgacgtactcgggaaactccttcgccagaggcaccatgcaggcacggaacagccggcgctcgcccaggccaccacggacatcacgagcataaaagagccatttcattgccatcaacttgtcctcgaagaacgccttagtgaagcgctgagagatgtcgtgctcgctggcgctacggagagatgccacagcgaaattaagatccaggagagccttgccggtagtgcggaagccgactgcaccgttctcggtgacagagacattgcactcgttattcagcgtactcttgatcccatccataaagttactcattatctcttacctcctatattgagatacccaggacacactttttatttactgttgctgtttatgcccagagaaatggagcggcaggtaggactcgaacctacgaatggcagcttggcttccttgaacattgctgttagcggaactcctcgtttcgcattgtaatagggctgctgtgttgaccacttcaccactgccgcatgaagctcgtctttccgagccgtcacaacccagttcaagatatttgggttgaatatctggcgtttaccgtcagcatagacataaacgatcccaaagccctatgcctatccgcccattagcaggggcggcttctgcttgtgccaggggtgggactcgaacccacgaccacgggattaacagtccatagaatgttgctgtaagcgtctcaacaagacacgcattagtacgcgctctgtccgactgagctaccctggcgtacgccccgccgtagcggggctattttgcatgacccctcttatgtgcattttctactcaaacccagccgtataatacggcaaacagttataccgatcggttcggcttcccgcactattatggctggcggcgaaccaggttttcaccgtactgtaaattatcggggtcgagataatgacatacggcaaggaacaacagacaagcaaacccatattcaacattagtctgttgcacctccttttttgtggctacactaagtagcttgttgcaaggagtgggactcgaacccacgacaatcagttccctttttacatagctgttagcgtaactgggggaggggaacgttacgcattttttatactggtgctctaccaactgagctatccttgcatggcgggaggctttttcattgctgtctgcgttgctctgtacgcatacgaatacggaaacctcccagaaaccgctatatccgtaaaatggctctttgccacgtgtgcgggacacattctcatttccaaagcaggtaatgttgatggttgctgttagtgccccaattcgttactgttcattcatcgtcgcattcatcactatactgtcatccgaagatgacttagggcttgtctcgtattctattcatggcttcctccacatacccggcgctggacgccgctgccgctgatcactttgaatcacagaacgatagccaggaacttcttcatgacacacacgacccttcttatagattgatgacggttttttaggagctacggagtcgaaccgtaagcaaaagttttgcagactttcaaggtaaaattgctgtgcgtgtccaccgtcgattacacgttatgagctgccgccggacgctcccatgtcgcccgtctttccgggccgtcagcggtctttcccgccgtcagagagaggaggtgataaagagttcgccgctattgcggcttggcggaggggatgggactcgaacccacacaccctttcggattactaacagtttagcaaactgcttccttaccagttaggattacccctccgtgcttttcaacgagacgcattgagtcaaagtaaaagtttgatagttgtaaaattgctgttagcgcctcatgctccggttggtcaaccgaatgaattactcactcacgctctctgcgggactggtatccaggagctttgcgaagttggcgatgatagtggtattgttcttccgctgctgggacatggcggcgcgtgtcgcggccagttccttggaataggtgtcgatctcagccaggtcgttgtcgatctgctggttgataccctccagctcattcattgttctggtaacgatgtctaccgcctcacttgcctgacgagccagacgagcaacctcagtctgcttttcctgcaggagatcgcgggtgacaggtacggggacggcgtttttacgggatctcattgctttcactcctcttacagaataattttctttgttgctatccaagaactaaatggccgaagccatttagtagaatagttgcttgtagagcttgtagtctctgatccgggctgtgtgcttgaccttgctggacagatcctcgcagaacaccttagacgcaaactccgggtcttccagattgaactgggtgctctcgcattccagcagatgagcacggtagaatataccagactggtgtattacgttgtaccgtagcgagtaggtaccgtccatcagggtattcagacgatttaccagaccctgcatcttagagacgttgatcttgctgttccgctccgtccgaattaggttatctgaatagacataggcacggaagattacgcctctggcctgctggtagtatccctctgcatccctcagacgcttgaatatctgcaagatttcaaacggcatctcggtcttctcaccgtttatcatcacgccgtcatcaagcacatcttccttggggaaattgatgatctgctcttcggtcaatccaaaccaagccaggtaaagaattacagcgggcaggtcaaacaaggtttcatcgtagcactcggacactttgatggaatcctggattgcctggtggagcatacccaagttcttgtagtattgcactccgctggtctcgttgattttcaggtcgtccacagtgacggaggccaaaatgctttcctgttctgccggcagcacgccattggcaatcaggtatcgcacatagctcatcacatggcttttatagttgaagaaaatgctggtgtgacgaaccctcatggagttgaacatggacacatactgttccttagtaaagccattgtccagcgattggcctgtctgctcttcataggccagaacctttttccaggcgatatcaaagtttttcttgacgcctaccttagcatagccgccgtccgggtcttcaaagaatttgttacggatcatattcccctctccaatccgttcaaatcattttctatgttgctatcttaccatacgtagctgagattgtcaatagcaaacaagaaaattatttgcgaaatttttcggggacatccgcttcacctcactctgtcgccggcacgtccatcatatgcttacacaggaactcacgatccgttacggacagggaagagaggattgtcaacagccgatccgggccggtcacgatctttctccattccgtataatgagtttgccacacaccgagccaatattgagcaaggccggtagcgtcttggttttgcttgaaaaacccatccagcaaagcgataatctcttcactggacgcttcgagaggacgcttgatatccttgcccttcccatgcgcaaccagaaccaggcgtgcgccttgagccagctggacgttgaggtagacataggcaccagaggacgctgacatctgtacggggaggacaccagtgtacgggagcttaatgtccgtctcgctgatactccgcatccccacggcgctgacatccaaatcatatttgccgaagtttgctgccatactgtttacgatgtgcatttttacgcgcctccaaataagtattaggttgactaaactgaaaacgtgtgatatgatatacttaaattcacgaatatgttcgtgtctggtatttactataccagcttactttcgtgctgtcaagtgctttacacgaaaaaaatcgtgacattcaaattctctgtttggaggttgtgttatggactccgtcatttttacaaggattaaagaattgtgtgctgaaaataacatcacaatcaacaaactggaatccgaacttggtatgagccagtattccattggaaggtggaaaagctctacttctccaactattgataaaatctccaagatcgccgagtatttccatgtctccattgactacctggtaggcgcttctaatgtgcgctctactgccgataccatgcttggcgaccccgactatattaccctccagcgagccagagaacgcatgactgagcaggatagaaaccgcatgatgggtattctgaaaatcggatttgactacgctttttccgatgagaatgatccgcagcagaagaagtccgttttattggacacggaataagttataatatgcacccatgatgtccccgtgtagcgaaaggagggcaaaatagtgaggagtgtttttgtacagcgtaaggtcttggagctttaccagaacatggattctgtatcctatcctatccaacctgaattgctcttgcagtgcatccccaaaagctgtcgcattttgtcgtatcaggaaatggccgaagtcactggatgcactgtccaagacgttgccgttctatgcaaaagcaattctggagcgacgcactacgatccagatacaaaccgttatcttattctctacaatgctgaaatgaacgctggccgtatccggtggactttggcgcatgagatcggccatatctatataggccatctggaagtcatagagggagccgaaatcgcctacaatgagcaaaggggcttctatgaccagttcgagagcgaggcagactacttcgcctggaatttacttgctccgcttcctatcctgcgtgaaatgggtatccgttccgcttctgagatcaaggcaacatacgggctgtccaatcaagcggcagcacttcaattcgaccgatacacaaaatggtgcagaggccatgtcaaaacggcatgggaaaacggaatgcttcgtatattccgcagtaagtacatggcctaaatgaaccgccctcttcggagggcggttttattattagctgatcttctgctctccccaagagattttgaagtttccgtcctcgtctgcctcacgagacatcagcaggctcatcaggtcataatccacgccaaagcggtcatacacctcatccagatctacgtcctgccccttcatgaaaaggttcagtttctctttggcgagcaccatttgcatctggttggactcaatgctcccagagtaagtaacaaagtagatgtctttccagtccgtagaggtaaagcgaacaaaccgcatatagaactggctcattcgtgcattgttgtaatgcagctccgggatgataactttgttgacgaactcaaagttgacagaggaggggaggcactgctgggtacaaaggagaatgccgtttccgctttctttcagagtatttttcagcttccgacgtccggccagagtggtagtagagccggtcacgacaaacagtttccgatccgggaatcttctgcggatttcattagcgtatgcttccaccacgttcttatggcggacaccaataactacaatctcatccttccattcgcccaccatgtcacaaaccttccgaattttgaccggcgcattcgggctgtcgtattcctccacggtgttgggtgcagcagagatacggagcaacaaagtaatctgctggatcagcgccatcatgctatccttgcggctattcccggtaagggcgaagtaccgctggcgcatggagaaaaactcttccatggccttttgatagacttcacgctctgcaggagcgaatgaaactggggtttgatgaagtctacgtatctctttgccggtgatctccgcgaaagtccgggtgatgaccgaataagagaggagcttgttcaggacatccgcattgtaaatgtcctgggttttcttacccactccgaaaacggtgatccgctcaggcagatgggattcagcgaacagactgtatccagctttataagcagggaagggctggccgtagtaaggattacttgaacagttcagatattcctcacagtcatccttctcatagcaatacaaatcttctgcccaggagagcatattgtaagagttgttataaagcagctcaagctgaggcgcacattccgagatgttgttccgggtgacagtgccggtcatttccagcttaaaccgtactctccgaaaacaatccaacacagcctttgtgcgcttgctatccgggttggtcatctcgtcggactcatcgaacaccaagcacacgttctggttccgcattttgatatggcgcttgatctgcttacggtacttggtaagcatattcagggtgatgataatgaactccccatcctgtactttgtcgaggtcggcgaggcactttatcatccggtagttggtcatgccatagtttttgaacaccagatcccagttgttcttgatggagatagcagtggacaccacccacacattacgagcgccctgacgctccatccgataccggcctgtggagatgccggccagcgtcttgccaccaccctgttcccactgtaacagatgataacgcttctgaagaacgaggttcaggtcgtgcttctgggtgttattgaggtgaatccactcctcgttctcattgtcataaacggtaaagtcgtccaggaactgagcgatcccggcgtcctgttccatctcggtaaaaggtttcgtctctcgctcatagtcgcgctgcttacgacgaataaggcgggcatactgctcaagacctgtatcatccgcttgtccagaggcaagggcatagaagggaacgagctgtttcatgccgtcgctcatgctgttctgtgcctttttgctgtaccctttgtaaatcagccctccatcccgcttgaccagtcgtaccacatcctggctgggctgcttatgctgagacttgataacacgacgaagataggccagtaccttagcttccgtaatacggatttttgcccattcctcatacttcatatccttgggctgttcctgatggcggaacttgtagagatattcctgacacttggcatatttgtctatcagtttggggttggacttgatatggaacatcagcttccgcacttcatactcgaacgcattgtcgctcccacccatcgacgccagcttaacgcgggcactgttgctccgcatccgctctctggccggggcaacgacttccttacggacgatctcaagcagctctgccgcgttattcatgtcggtcaggttgaaccagttggcgctgttcagagcataaggttctcccttgtcggcagcgtccagcttcttctgccaaaagagtatcttggtagcgtagctatccacgccaagagatttgaacgcatccttctgaatggagacctgacccaggaaagagaaatcttttgccagttcggaaattttcgcgccgtccaaatattcgtcggccaggaaagacgccggcaccacaatcaccataatgcccagaggcttcagcagcttcgccgctttcaggcagtagtacatctgagagatgatctcgccaccctccgtctcccatttcagattgaacggagggttgcccactacatagtcaaaccgcatattcggctgatagaaacggatatcacggtgttccagattagcagcggggtaaagatagtgcgctactttgtgggacttgatgtccaactcacaaccgtagaagtttgcctccagcggcatgaagttacagaagttggcgatgccagaggtgaggtctgctaccgtttcgtccatagcaggggacagcgcctccatgataaactggcaaagagcgggaggcgtaaagaactgaccgttctcgatctccttcttggcctccgcatactcatgatagttggcaaagtcagaacgtttcaggccatgcaatccaccgtctccggtataggcattatagatatcctcgcgggagatcccagactgttcggccaaatcctggtctaccaaatagaggatcttgtcgttcaactcctgtcgggcttcctggggaatcggttcattaaggtattgatacttcattctttcacctgctctatctttctttttctggagagaggcttttgtgcggagtcctctcagaaccgcgcccctcacttctattacagaaagaaaagggggattgctaaccggtcaggctctttttcttacctgataccactttgtaacgcagtctccaaaaagcgggcaggcacgagaacaaggataattgacgatcttcttttcatccaaaagacagggcatactgtctctggaggctccaagatcaatctcactttgccggagcaatttatccgtaaacccattgacatacctgttatcatctctcacttgggctaactggaatagggtgtagatacgctccgaaagattgggattacgtgtggcatattgctgaagaagctggcgcagctcatatccgggcttgtccgcgcccgccatataatcaaacagcgcctctctcaaaatcgtttccatcagcttcccggtgtagtcttccttcggacaagcgcactcagcgctcatgtatgcagcgatggcctccaacggcggagcattttcgcccgcgagtttgcaatgccctttgcagcacatgatgatattacaggttctttgttccataacctgcctcctttttgctcagatagtttcttgtagccctcgctacaccctccaaaaagcggttccactccatgttatattcacctgccggccattggtggaagtcccgaagcataggccaaactgtggcagaaatttccacgtcgttcaggagttttaccaatggtacaaaattggtaatcctcagccatgcgtggcaaatatatagcacccgttcctccatgttggtgcgcggatcaatctttccggtggagtgcgtttccgaaaagtagtcgttatgcttgatatataagtcgtcaccttttaggaatagctggcactgacatattccctcaaaagggacagaagcgaatttcctaacgcctctgatttcttccggctttgggagcttgccgccagcacaaagcacttggtattccgacttcgggaaaagaaactgtttacaaaacgcagctggattagatagggtcttagtgattggagcgaccagtgccccggatttccagaattgatactggcacaagtcgtaccacattccgtcgctgatatctcggaaaagcatcgccaaacagatgcccgccgacgtgttaaacctgagaagataaacggtagaacctttgcgttccgccgttttacaatcgttggcggcagcaagcatccgctcaatgtaccccacatgagattggtcggtatgttccgtaattgtggcgtccgggtagctctcctgggctttctcttgggtgggatagtagagcagcaaagtgtggccgtctgcgattttcaccttaaaccgtttcaaaattaacacctccaaaattttcgcctcccgccttaattacagacgggagacgacggatgctaacctcatctctcaatagtagcgagaagattttggatatgagccatttctttgccccgttccaccgtttcaccccggaagcagtgaccgcagtattcccaaataccattcggccactctccaccgaccttacggaaggtggcatagatgctccgccattcgccggtcttttcatccagcttgctggagtacggctcgcccatctgagagcaccgggcactcatacaaacaggtggcagacaatccattgcattgtccactacggcctgagtcacaaagtcaccgggctttgcggtggcgtagtcgaagtcatcctcatctatgacttcctttccgtcccagacctgcttgggcttgggagcgatggtggacacgtccagcagatgagcgccagggatattccgcttgacctcccacacctcatccatgccgccaactaagttatacagctccttatggctatgagcgacattcagccgtgacccaggcaggttattggcctgctccgggagaggcacgccattgacagtagcatggtaactggcagtgatgtaggagatcaccttgaggaagtccgccatgttgctcacactgctcatagcctccataaactcaggccaagtatggtcacaggctccaaggccgaagcgttccatttcagccttgtcgccgttatattcctcggaaacgatatagctgtcattcagatcgttccagaaaatcactttccgtctggtcatgtcaaactctccccacatcgaaagtatagttgcttgtagcaagtccccagaatttcgtatcctcgcgtctcttacccgaatataccgcattgatacgataattctcgttccctaccataacgtccatgcttcttcctgttttgcaaacagttctcaaagctcgttctgcgagacatttatagatgcccagagacaagagcttttcaagtgcgtcttcaaaactcataacatcctcctcctgtcaaggacggcacggcagcagaaatgccggctcgtcccagttgacactatctcgctcgtcacgtccacaccgcttatacaccagcaggcacgggtacggcgtccgcattgtgtcgctgctccccatatagatgttacgatacggcccgacagcctccaagatatccagatagcgataagcgtcgaaatagctcgtcataggagcgccgttctcatcctcggtggtaacggtaatcttcgggaagaggggcttccccaaattcttcatatccctccactcacggatgatctttttgcaatcatccacagtgggcggcgaaacaaccaacgaagcgttcgcgtccttgagatagtcctgaacgtatttatcatacgtttccgtccgatcacctacggggattccctcgggctgttccgcaaacagcaccaccatagttccatctgttatggcaaaatgcttctcgctgggatgaacaccagccagagcctccgactgggtttcgtcatatcgggtctgctcccgccctacaatcctttgtagggcggagagctgcttctttgtcagtttcatgccgggtccctcctcaaatattgtcccacaaactcctggacaaaagcggcactgcggaacttgatatccacacggccatttttgaacagcttgatattttttaccttgctcatgtacgcgatctcaaactggttttccttggtatcgtacttgaaaagctccgggaaccaatttgcgccgtccttgaacttcccagtctcatagtgtgccagcgcattcagaatggttttcagggactcactgggcttatactcagggacaggactgctcatccatttgttttcatcacaatatacccacgatccggtcaggcggagcacatcgttcttgatctcgaacttttccacatactgatcggaactccagtttctgtgatgagatgcatcccagcacaaccggagaaattcattcatggctcgctcctgaaatgagaatccgcccagttgcacaaagatctcatccacgacctgttcataccggagagggagagtacgcaaggactgttcaaacttatccttttcgaccttataggcgtccagctcctgctgataagaggcaatctcgtcttcgctcatgcttctgtatccaccccagggcaaattcggctccttcgggccggtgggaataagatgctcctcaatctcgtgcttgtccagctcaacactgtacttgcggctgaaataattgacgacagctgaaatgaatgtgcggttcctcttcttcatggtgtcgtaaacaccatctacgtcgcaatcaccgcccacataccggtcgataaagtcttcgtttgcggtcaggattccagcctgctctgccttggctgcggccatcgcctcagcaaccttctggagcgccggcccagccttatcaaaggcttcctgctggcggagacaaaacaccttgtcatcctcggaaattctgttgtccgccttgatctcgacggcggagaacttctccatcaaactcatctttcttcctcactttcatttttgttgtatctacgaacaacggtatcggagtatttgttggcgtgcctcacggccacgtgttccaaaatcaacttcacggccacgatgacaagcccaaagaggatttccatatcagcccacctcactttatggggtgaggctttttatagtggagcctcccagaccactacattttcagaatgaaactactatttgctaaccattaaaacgtaggcgtttcctcctcatcatttttgaatgcggcaagaaattcctcatcggtcggaagcgcgtccaggttccactttgctaccagccggacaccgtgatacccgttatcctcctccaaatcccgcaggaagtagaagcggtcattctcggccaaaggggtctggccgaacccgcagtacccctcaaatgttcccgcatccaggtcaatcacccacgcccactcacagaaaagaccgtcagcggcaaaattgatgctgtcctggagcttcatgccctctgagtggttctgcaccatttcaaggatgcccgcaccagtgttacggctaaactcaggatgatcttccatcatcctatccgagtcttccatcgtgaccaatccgttttcgtctgccccgtattgcttccagagagcagtaagctcctcactggggatgtaggacgagttccgcaacgcttccttaaacagttccagatccatcttgtcccgaaggaaggtgagtaccgttatgccctgaccttccgggtagccgtcccactgaccgtactgtgccaccttatactgcccgtccaggtaaaccgctgtcaaattccgagtccccattttttaatacctcctatatttttggttattctaattacgtaaataaagctgttatttgctaaccttccgcccgaaagtttttgttgaactgatccttgtaggcagcaacgccgttccagtcgtcatatacaaccttctccgtctgatctcccagctggaaaaccaggttgggtcttggctctctaccatcttcccatacccggcgctctccacacacataccacttggcaaaaagctggcgggcgtgtacctcacgcagatagtaacgctgtgtctcggcaccccgataaacctctcggcctgttccgtcttcgatgccgacaaacataaccttgatgactttctcaggattgtgttccagatcgttgtaccaggaattttgagaacacttcataaaccactcatcgcagaccgcagagtgctccagctttgcgtgctgttcgatataggccagccccagccggtcgaactcatcctgtttcatgaaggactctgccacgtgtccggcgtcatcctggcatatcagctttacacggtctgccagacacgcctcggcgttcattccgacggcattgaatttttcgtaatcctgtggggttatgacagcaaccgtaatcttcatactgctacctccttatactcaaatcttaacggttccactcgggctatccaatcaggggttccgttcatcggcaaaaacatagtggggagaatagaggctcccagcattcttgatgtagtatctctttcggttgaacgtgatgtactgtcttccgccatcatctatgatcggccttaacttttctgtaataccatcagaaacaagtagctttgcataggggagaactctcttgttcccaaatatcggaattgtgtaatcgcatattttcttaatgactaacatatctctgtctccttaatatcgcttgacccgcactttcaaaccgtacctcttggcaagctcgatcatgtgcttggtgccacgactttcaccgttccagaatgcggccagagcgtcggcgttctgtgccatctgctcattgcgtaggtatccagctcgcttgccgtatgatttccactgggcggggtaatagtcaatggcgtatcccttttccatggcatactgttcacccagcgtatcagcgcccttggcctgtccacaaaaaacggtgatctcatccgtaatattgcaaagcagtttatccatggtcgctttcaaaagctggtagtcatcaaagtctcgccctccggcgatgataactcgaaacacattgaccacctcctcactatatttacagaccgttagtgtttcttgctaaccaaagcaatcaacttttccagctgctgtgcgactggatcagtgatcgtcaccagtgcataatcccgtttgtagtaaggtttacggtgctctttatcagtgtaccagcggtatgtatgaatgttggattccgcgtactcccgtcgcgcccaggctgttatacgttccacctcggcaacaaacactccgccggattgactgttactcttccgatagactcggaacatatatccatactcaccctggcctgcaatactcgaattggcctgctcatccaaaggagcgggacgtaaccgccccagctccaccagctcataaacatacttggggattttcatgccacatcctccttctcaaagtaaaacggaacgccggcttggaagggataaatcgtgaagtcgtggtcgctccacactcgcattgcatgacggcaaggcttatccttgggaagaacaatccgcttcttgccgccaaacatgatttcgatatgatcgtcggcgtatcggttctcaacttccagcagcttgaagatataggacttcgcggtttccttgacttccatgacataccgataggcttgaaaaacattgccatcatgctcggatttgtaacgtccaggccgcaacataaacacacctcacttttgaataactaagggagtatagagcctcccgtcttgaatatatgagccatcgttaatgaactcgaatttggtagcatggactctattgacctcggccataacctgctcccaagtgaggctcccacgatcaatgtagattttccaaagagcgccgccaccgacaaattcatactctttgaaaattacatgagggagacagcacattttcaaacaggtatccagccggtcaacatctctctggttctgatatttaacgaccatcagccgtcgcttttggcttatgcgtttcatatactcacctccacactgtatttacaaatcgttctgtaattttgctaaccaaaaaaaagagacgggatagatttctccatcccgtctcgttctgttcttatcgtgcgccaacgcctgccagcagagaggccatcttgtccatcatggcatggccatccatgattcggccccagttgttctcctggtagttggaggtcatgcggcggggagcggtatgtccaaccatgtcgctcatcgcgttcagtgcgccccaggcagtccccttgaacttgagaatgtccggcgcaaaatagcagatcatgtactcttcacgggctttcgtcgcgttccgcttttcacgctcgctcatatcctccgtggccggaaacatctcgtccagaattttggcgatctgctcatcggtgacggtcttgttcgccatctggtcggcgtacacagccagcttgtccatgtacttattcgccatgtccagacacatccgcgcctcctggagcttggcctgaatgtcgccggtatgccggacagaccacgcacgctttgcgccgttcagtgcgatgttcagagtgttgttgcaaaccacccggataggcgtcatacacacgcggatagcgccgctgccgtcgtgggtgttggagaagcacagatacggctcggtcttatcgccgacgatctccgtatcgggcagttttgccagcagccaaatcttccggccacccataaggcttcccgccgtctcatagtgaacctgaccctctccgccaatcagagcgtcggtgaacgcaaatgcctccgcattctgcaccacctgataccggtcactgaccacgcccagcaccgcaccgtcgctgctccgcacattagcgaagaagttatccaccttgcgcccgccgcaaacctgaatgggcttgcgctgcacagtccagtccagaccagccagccgaagtgcatcggcactggtcggcgcttcctcaacctgagtacccaggccatgccagggtttctcgcgtccagcatagaacatactctcaacattcgcagacatttttacgtacctcctaaattttgttctcgtttgtttttttcttcggtcattatacttacagaaaagaactgcgttttgctaaccgtctgtttaattatcccagatatcgttgatatcaaaggaaatgcggacgtgcccatcaacggcagaaatcaccgtgccgtcggccttgttcatgatggccgtgagagccactgtttcttccttgttcagagtagcggcaggggagaagtccagccagagaatggcgtgcttctctttcatgttcgggtcatacccgtcgatcatccgcacgtcatcgcacatattcataaactccaccaggtcgtttttgacggcctggtagagcttgatcttggaaaagttagcacgtgttccgttgaagttttcgttacgatcgtgcatctctgcgatctcttcaggggtgtagtttacgcgcatcctttcttcctcctcaactccatgtactcggggtaactcacccccatcaactcggcggcggcatgaagcgcctgcttcttatctcccaacgggccagcaggcaccttgggagtctcaatcttgtgggggtaccagcgggaactgcccttctgcttggacacatcataagtaatgctcatatgttcctccttataaaaaatggtttcttaccaaacagcacgccagccgggagacttgaccagttcatccagcacgtcctctttctggtctgccgcttcctgttccccttcgtccgggaagtcggaaacatccagatcatacacatcaacgcccacatcagcgttagaatgaacctcttgtaccaagccaccagcaacacgaacggccacctgcacatccagctccttctcctcaatccgccagttggtagaatcgggatcattgcggataactgcggtatcctcgccacactcgcattcctggtcgtcggtcaggttttcagcatcaacattccaggatggaagctcggccttaaactgcttgcgcatctcggcccgcgctgcttccttatccagaaacagctggacggtggactgattgctcgcgtcggtatcctgctcgtttatcagcacaaaaaccttcatcatttgttagctctcctctcagcacggttattgatatattccatcacagcctcatacagcttgggggatgcggtgaaaagaaagacatcgtacatgggattgtcccggtcgggagctaccttgtaaggggtgaaacccttctcaatcaagaaactgcacattctggcccgcttgcatacataggtcttctgctcgttggcgttgttcatctcttcaagtcctttcaaaaagttgtttagaattgcttcactataattacagagccagggcgagttttgctaacctctaaaataaaaagcccgccgtttttacggcgggcaatctattaggccacgacagatttcaagcgggcacgaggattagaggcaagctgataccacgcctcaccgtttgaaaatctggcagtacacacatattcctggaatccatatgccttggcaaactcggccagcttccggttgatcttccgaacttccgacgcatacttccgataggctacactccgacagcagtcaaaatagtaatggcagtcatcgttggaataatcctgatcttcggtcagatcgtgattgatttccacatagaattggacaccagaatagtatccgctttggagcttaacttcatggaacagcaggccacgattgaagtccagcagttcgtcctcgatctcctggcgctcgtcgtaggccgcacactcatcataatactggtagtcttccagctcgttacactcgcagaactcacattccgtatcgtctgcgctcaggattgcgccgcattccgggcagcgcttggcgtcctcatagtagtccttggcgaacaaagggaagtccctcatggtacagaaattagcagcgctcattttgttatcctccttaaagttggttgcttgtgcttgtactataattacagatagcctcccagttttgctaaccgggaggctacttttttatttgccgtcatcaaattcctcggcgtcgatctcgttggagatggagaacacttcataggcggcttcattcaggcgtccgatagatgcagttgcgtgcggctcgcggtttttgattgcgtccgcctcagcctccagcaagtcctggacaaaagccagagcctcgcccacatcagcatccaccacaatggtggtgctatgcttggccctgatctcatcgaacttctttttgttcatgtacattaaaactcgtcctccttcacaaggatttccccaatggatacctctgcgacatagttgaagtccagcttttccagcagccgcttcatgacctcgtggcgaccatttgcgctcacgatatatccacgaactgaaccgctgaattgacgaacgacaacagaatatcgcgggcgaaagtattcatcttcaaattctgcacggctcaacccctctaccacatctttcccgcaggccggacacgcggtaaaggaatgcccctcgatctcttcgtcgtgcagtttatccgccgaaaaatatgaaccgcaggcttcacaggaaataatatgtccgttgttacactcggacgggacacaatcgcaacaaacatggtattcattgtctatgccttcattgacaacaacaccttcaaaattttcttcatcgaaagaacatccgcagattttgcaggttttcatattcagcacctccactatatttacagaccgttttgaaaaattgctaaccataaaaataaaaaaggagagggacgaccctctccctgatttagaaacactcaaaccccgtgatgaccagcaacacattgaatagcacacgatgatagtcgctgttataaggattttctgccacagctttaagatggtatagagcagtcgccaacattgaccgtcttaccggttttcgtagaccgggaaacattgaaaattctctcgctcatcttggcatctcctcagtaaatcagaatctgcttagagaacagcaaccacagccccagcggagccaacagtacaaccgccgtgccgtctcgatcttctacggttacaccggtggagcacatccacagcaccagagcgcagcaggccagaactcccagccccatcagccgctgctcgattatcttcttgcggtaataccgccgttcatttcttgtcatttgtgcttgtctcatttttttatcgcctcctattatatttacagaatgatttactttgttgctaaccaaaaaagaaaaaagacggagagaaaaatccctccgccttttttaggctaccacatcattctgaagctcggccatatgctttttggcctcttccagcaggcgcttttcgtcccattcagcggtgaactttgccagctcgttccagttgcgtttctggtagatgttgtcggtgatttttaccacggcacccaggccacggctgcaccacatacccggcgtgctgctcggagtccacagggaaagggaaaggcgcggcatcatgccgatagtcttctgatagaaacagcccaatctcggctcctcgcgcacctcagtccatccgatgtcagccttcagcactttgccgtccggcaattcgatggagcgcgtagccaccttgtcattccagatgatgaagcgctccagatcgagccgaaacccgttgctcagttttgcgttccagcgattaacctgctctctcgtgcattgtgccattttgtcttcctccttaatatttgatctcaatgcgcttgtctccggcttcgatagctacacggagcttgccagagataacgtccagttgttcggcccgcaggatatacagggaacgtgcggccccagtttctactgtgctcagggatttcaactgctttatttctgcttccagcttgtcgattatccacttgatttcaattttcgtaaacgcctgcattttgtgcctcccttacagcaataggactttgcgtccgtcagatgttatcccgtacagggcaccgccaacagcatcagcggcccgccgtgcctgctccaagtttggtgtctttcccatgtattcccctttctccatgggagactttacggggcggtaaacctcgaaggaaacgtatttgttttccatcactgcacctcctggtataattacagaaggggagaacgatttgctaaccgccctccccaaatttttatactcccattcctctcttgaatttctcatagtcgatgacgcagatgatggcgctcattgcgtccagatactccgcagacttatcaaccgcctgcacgccattcttcttatcctccagatactggtcacgtgatttatcaaaccactgaccgtagatcatgaccaccatatcccggatattctgaagctcgatgttgttgcgcttatcaatttccagcacttcgtagatggccttggcctcctcgccggagacgataccccgcactttcggggcgtatttctccctcagctcctggatggcgtgaaaatcagttttcgttgtcatgtgtcattcctccattattttgactttctactttagttacagaaagaaaggcaaatttgctaaccatgaaataaaaaaagaggaaggactttttgcccttcctcttcggtttagctataccttattcacaccatggctttttccgtccggtactgctgaaccagggataaacgccggactctccgcgctcattggaaaggaaccgggccagccgctttttgtcgtcctcgttcatccagcaggtataattcggattgtcccagcgtccgttatggcgttccttgcgttgcatggatttgacagcggccaccagcaattcctgattgatgtccagcatggcgcagatgtcggccaaaatgctcccggtcgctcctgacttttcaaacagctcgcccaggcggtatgccttggagccattcagggaaggaatccatagggtagagttgggagccagccccagctcttttcttgtgtccagactgtatttcatatagtccgcttcggcgtccagataatcgcagacgatggaaaccaacttttcgacatcatacatgatgatctcctcctatcaatagccagcggcgcggccaaacttgacggcctcttcaccctctgccaactcccggatatactcgatcttcccgttggggagttgccactgacggatataaaggcgacctctggcccgtgcctctgttttattcttcacggtaaaaaccgcttcgcccgtgccgccgtcatcatcagtgatacaaactgcatagcgtttcattctttcgacctccgttaatttactttgtcgcttaggaacattgccccttacactatatttacagacggtttttcaatcctgctaacctaaccggcaaaaaaaataacgggccagccaccagaccagcccgtttttatcagccgtaaattacgtcgccgaaaatcgcatactgcaaaatgcagtcagcagaaattccgtcgtactcgtcgaagtcgtccgcgttatgatcttccgcgtactttttccagccgttcagaagtttttccagcgtcagctcgtggtctttgtcgtcctcacggtcatacacggtcagcttgccgccactctccagaatctcggccagcacgtcctcatagcagggcttcatatcggccttttctctctccgccagccgctgccgcgccgcctcgtagtccttctcatcgctgcacaactcgccccagtagtcaaagccaccggcctcgcaggacagtacacagtccacgatgttctccgtcgtgatcttcaattccttttcgatcttaaatgtgtgttccatctttcattcctcccgacaaataacgtgccgaatttgcaaaagctcctcaactgttccatctcttaaaatctcgcggtttttggcctcgatctctttggcctccgcttcggtgattttcttatcgcccaagtagtagcacttcaatggacttgaccacctcccactataattacagactgttccaatcatttgctaaccattcagtaaaattttccgaaaaagaaaaggcgggccaggttttcccagcccgccgatctgttatgcaaccgcgatttttccgccgtcctctttttcgatcttctcgcttccgtagtagcctctgatctcgtccagcgtcagagacttcttgctccgcttcttgtatccgtcgcggtggaaataccacgcggatttgttgctgctccaccggaaagacagggctttcagctcttccttgtgcggcctggtgtcgccagtgacccacacccaggaaccgcatacctcgatctcgatgccctccatgtgaatcagcttttcgatgatgtccatgaactccgtggccgtctcggtcgtggccgtccgtgccgtgtaaaactcgccctctgcgtttttgtgggtatccttcagccgggagaacagcgcttcatactcagcgttgatctcctgcatatccgaagttttgccgccccggtcaggatgattttgaaaagccagcttcttgtattgctttttcaggtcttccagcgtctcaggattattgaaccacttcatgtttgtcagcctccgttattttcatttgatttccaggtatctactataattacagaatgaaattcgtatttgctaaccgttcccaaaaaaaaagaaagaggcggggatctcccgcctctgcttcatatcatgttgaacggaacacgcgggcgctcgatcattccacaccagctcagcgcgtgcgcctcgtccgccgcctgcgtcttcgggatataatatccttctgaatactcaaaaatggcaatccatccatcattcatagtcacgaaaagataatcaatcccgtttatgtattttctttccttgttgcccgtaccgttctcggcaatccacttttccaatcctgctgcatccagcattttcaacacctcctgttatatttacagacaaaaaacggaaatttgctaaccaccaaaaaacttttataccaccagcatctgctccgcaaagtcgttgatctgctgctcactcatccattccggcgcggctccaatctcacacaagcgacggtaaatcatccgcatcagtttgatctgctcgcgctcattgcctgcccagagatggcccgcaaagcgcccaccgtttcccagataatacagacaatccgcttccagccgtcccagcatctgatacaggaactccggcgaactctggttgattttctgaatatccatttgctttcctccgttccaaaataaacattgcgtcgatttccattatttgatataattacagaagaaattatggacttgctaaccgttccaaaaaatatttttaggtgattatatgtgggtatttgtcattcttgcagtgatcgtcgccggataccaggccatccagcactataacgccgtatcccgttatgaacacgttccgtttttcccgttcatgttgaaaaatcatccacttgttaccatcggcgcagtgatcgcgttcggcttcctggttgttatggcctttaactgaagacaaaaagacggcgggaaaactcccgtcgttctcttttgctaactgttccagaaaaaaaagaaaagcgggcacttggcccgcgtttctcaatccttcgccgccgtcatgaagtcgtacagcttcgccttcaggcggatgatctcggcctccgcagcatcggcgcggctctgggcacgttccagcgcggcgcgttcttccgatctccagtcggtcaaagtatgcgcttcttctgtcagctccgcaatccgtgcgttgcacctgtccagcttctcccgcattgcctcccgttccgcccgcagtccgtccgcctcggtcttgaccgcctccagcttctgttccgcactctgccagcggcccgccatactgagcgcccagtcgttttcaatgttcgattccgcgtcttccacgcaaccggcaaaggccatgccgatatagctatcagccccagcatctaccaggatgtttttaatccgtttcagcgcctcgcgctcctgctgtttggtcatcattttgtttcgctcctttacgtcgttttgtgtccctctgttataattacagacgccgcacccgatctgctaaccgtcccgaaaaattttcttgcacggcccgaaaaaacagaaaagcgggcgggagccgtagccctcgcccgccgtcctgctgttagatgaaatacatctcgccgttgatttccagggcgatggcctcttgtcccatctcccgcttcagctcctcgcacagctccaccacgcgcccgacgtgctcctggagcgccgcatccgcagcgtaggcgaaaactaccgttgtagcctctgccaccaggccagcagccggagacatccagtagcccagcgccggggtggaagtcgcgccgccgaaaagctcggagaggagcgccgccgttttcttgacctgttccgtattgtccgccgcctggtcaatgccgtttgttgcgggtacgtaaaccgtgatcttgctggagagcttcaagcaatttttcagaaccgcgttattgatagtcatttttgagttcccctttacgtttttttgttgggggccggcgttccgttttgccggccccgctatcatttacagattgattttctttgttgctaaccgttcggaaaaatttcttttcaggcaacccgcagactttccagcgccgcccgcatcttgacaatgcgcttgtgtacggccacgttagagatgcccacggctttcccgatctcgcgctctgtcttgtgcgcggctaccatttccagaatctgccgcccgatctcgtccagcccatcccggaacgcgtccaggtctgcccggatgatggcgcttgtttcggtgttcaccgtagcatctccgcagcaggtttcaaggaagctcgccgcgttgccctcgccgtcattgatttcccagtcatacgccgcgccgtgtttgctgtcggcgtagtacaccgctgcaatggcagcccgcgccgcattgtagacgacggacaccaggcgcatcgggcgtttaccctgagcggcccgccgttcatttgttgcggccagcttgtcaaggtcggccagcttgtcaagaacccgaatacaggtctcagatacaaactcatcaaaatcatggacacggaagcaaccgaacgcgggcacttcagagaactgcaggtaatggtcttcggtggaatagccgatttcattctttgcggccttgcggatgcaagcggtcatcattcgcactttgtcagcgtcggccatgttcgcccactcgcctgcgatggcggcggcgttggtctcagcgtttgcgccttcagcttcagcccaggcgatcttcagacattcgcccatcaggacttcagacaccttgcaccccatgtcagccgccgccgctttgcggatggcccatgcccgcgtcatggtctcactcatgttgtaagtctttttcattgtttctgtctcctttacgttgatttactttgttgctatcgggaagcggtggagcctgccacccggagaggataccccggccaacggccccagcgcccgccctctttaactgtctatatcttatcataaaagatcccatccgtcaatcatttactttgttgctatatccaaaaagttagaaaaacagcctattttacacgaaaacaggcatatttacagcgtaaaaagcacagaatacaagacattattttcgtcattatgctgcatttcttattgaatctttgtgcattttgccgattagcaaaccgcttggcctgagatcgccacccatgcccagcgccagccccagcgcccgcacagactgccccagcacggccagcaggggagacggacaacagacacggcacgagagcggccagccctgccccatgccgcaggagagcacgacacgcccagcgccacggccagacggacacgccgcccctatgccgtcaacctgcccgcccagatcaaacagacagagccggccggaaaccgcgaggacatccgaagagggagaagaagaacacgaagggaggaagggcgaaaagatgaggacttgcgcccgcttgcctgccgttttgccgtcaaagtcatatatagaccgaaccccgcccccaaacggccagcccagcaccgccccaggccagcagacaccccagcccgcaccggctgaagctcccagtctcccgacgtactcccgcccgtttctatctctgtcaattctgcttttggagagtttgcagaaccccggcccgttttcgcccgtcagcagacgaacaacggcaccccgcccgcctgcctggacgccaccggcaccgggggagccttcacattttcgcgcccgccccgtttctcacgaaacggcttagtacctctactctatcacgtacaccccatatccccatttttcactcgggaacaatctcgacgattccccaacagtaaatgaattaaacccgtacctccaaaatcacatttttagccttacaacctcggtttttctgtcaaccctctataattcaccccgtttacagtcgtattcttctccgatagcaacaaagaaaactaatattttaattgactttagacctcagatatggtagaatatattaaggtaagagacaacaactgacggtcttttgcgacaaagaaaatgaggtggactatggacacgcaacttaccctctttgatcagcctacggctcctcagatcaataccgtaccgccgaccagctgtaaaatcattcagttccccggtacctctgctgtcgagcctcccaagaaggtcaactaccgcaaaggagaagagcagacggttttcccgatcaagtctcgtgagcagcttgacgctatggcctcctggctacgggccaatgctgatcccaaatacctgctggcattcatcctgggaatcaacctcggcctcagagccaacgagcttctggaactaaagtgttctgatattttcttccctgacggcaagatccgctacattgtcggagactacaccgataccaccgacaaaatctcagtctttcaggagaaggtagacaagcgacgtggactttatctgaatgaatcatgtgtccatgccattcagtggtactacggtaacgatgccagccactactctgatgagtacatcttcgcttcccgtgaaggtggtcacattgaagtggacaccctgcgcaagaagttgaaggatgcggctaaggcttgcgggatcaagcagaacatcggtacccataccctgcggaagactttcggatacttccactaccagagcaaccacgacattgtgttcctccagcgtcttttcggtcattccagtgctctcatcaccatgcgctatatcggaatcgcagacgaggaagagaagaaagcctaccacgatgtttcaatcgacctgttaggggacatttgattttctctggtgtccacgctgccagtcggcagaagactcaagatactgggggatgggtagatgactaaatcgaaagtgtctaccccgcacctaccttttgggttaggccgctaccaactctccgtatatccgcgagcgaagcgagcggcctaactgcaaaaacttcccctttgcaaattggctatttttgcaactttttagactactttgagcgtagcgatattaccccttccccttctaagggacgattttcaaataccccgtttgttgacgagcgtttgagcatcgaaatttagaatttatcacctcaaaagtgataattcgattttggggttctgaacttttgaacatttttggaggttttactatgttcctgaagaagcactcccagccggaatggacgccggctgaccggcaaagagaacggttgctgctggactactttgccgccgaaacaaatctggaagagaaagctaaggcagcgatcgtgcgcaagggcgtcattgacctttacccggacggccccgacaaagatcgtgccatcaaggactttgaggcggcgcaacactctctgctctgtgcgatcggtacggtggatgggctgcgaaatgacatgaggtcttacattgcggcgcacgagaaggacttcgaggctacggctcgatgggcagtcccgagtgtcaacatttccagccataccatcatcgaaaaggtctaccgcgatttctttgcggcacggtaataaggtacggtcatgatcgagatacaaaacaccggtagtctcttctatctttctcaaaacgaacatgaggctgcggtcgtcaccaccaacggcgtgattcgtaagaacggggacgccgtactcggtaaagggcaggcgctggaagcgaaaaagctcgttcccggtttggaacatcagttaggtgagtacctgcggcggtatggaaaccgtgcattctatatgggtgtccatagggtgggggatcgccttacatctctggtaacatttcctaccaagcaccactaccgtgacaattctgacttggatcttattatgagatctgcggtacagctaaaagagatcgccgccaagttccagctctccaaaatctaccttccgcctgttggctgtgggctgggcaagctggactatgagaagcaggtacggcctgttctcaatcaggtattggatgacgaccgatttgtggtcgtcctgggatataagggtttctgaggaggcacacccggacatatgctctgtatatacgaaatgatggaggtataacatgggagtaagtatcagcgagtttagaggtgagtattattttctgagtaacttctactcggcaccagttacctacaacggaatgtgttttgagaataacgaggcggcgtttcaagcggctaaatgcccagaacgtatgactgagttttgccgtctgaatccgtcagaggcaaagaggcttgggcgtagggttaagctccgtggtgactgggaggcggtcaaagataccgttatgtatgagatttgcaaggcaaagttctcacagaatcctgatttggcagacaagcttgttgcgaccaaggatgccgaactcattgaaggcaatacttggggcgaccgcatctggggcgtctgtgatggcgttggagaaaatcgtcttggtaaaatccttatgcgggtcagagcagaaatgtgatgtgaactatgaagaaggctaacacttataaaggaaaactcggctggcagtctgagtttagccacagatatgcttgctgggcgaacaaccacaatgggtgggcaaaagccaaaaagtctaacaagcggttggctaagcgcagattgaaggatgagctgcggaaagaacttgtttatagcgcatcggataaacaagttggagaatgagcggaaggagaatttatgaatggaaaagagacgtaggctgacgccggcagagcgccgcgccgtttatgacaagatgggtgggcggtgtgcatactgcggcgagcagctgaactatgaggatatgcaagtcgatcacgttgttgcactgaggagtaagggcgaagacgatctggcaaatatgctgccggcctgtcggagctgtaatcactacaagcgcggcaactcattggagggctggcggcgaatactggaagctatgccggccacattggagcgtgactgctatacttaccgtcaggctgtacggtttggtatggttaagccaacgccaaagaaaattacgttctactttgaaaggcggtgcatctgaatgaccgacattgaagttttggaacgggaaaaacagtgcgtacagaggaagacggcaatcaactgctctgactgcgcccactgtgatttgctcatggacgatgccgctattttagcagcgtatgataaggcgatctccgccctccgcgccaaaagagtgcaaaaagtaaatgatctgtacgacgaagacggcaaagagatttacgaagaaaacagggaaagtagcaccatgtttactttggatgaagcaattcaacattgctatgagatagtggaaagactgagaaaaagcaacccttgtgatacctgcactaccgagcatgaacagctcgcccactggttggaggagcttaaaaagctcagagtggaatgcgacgggctgcgctcgaactggtataagtgtgcggagaaagtgaaaacgctgcgggcagagcgcgacgccgccgtgtctgatcttcgtaagctcgttcccgcctggaagtgggacggcgagaaggaacaaagcgcccacaaggaagcgcccgaatgcggttgtgtggagtttggataaggcggtggatatatgaagcattatgattttttcggtcaggagcttatggtcggcgaccgtgtggcctacattgactccaagtaccaagagcttcggaacggtgagatcttaaaactcaatgaaaagcaggcaactattcgtaatctggacgacaacggcctattcggagacaagatgggatatggccggacgtgcagaggctatggctgcatagtgaagaaagtttgaccctcaaatagcaacaaagtaaatcaatcagaaaggagcgcgtgcagtggacgatcttaaagagttgacgcgcagactaaacgagtctgaagcgacgatcctgcgtatgaatcaggagcgtgccgctctgtttgaagaggtgcaagcgtatagaaatgccgcaagactctatggaattgacccggcgacaatgctgacgctggctaagagtcaagtcaaaacctgcgccgataatatccgcctcattgagaaaatgcaggaggtatttgagctgttccggtatgtgccggagaatctgacggagcaggaggttgtatcagcaattacccaatacgatggcgacggctccaagccgtattgcgatctggtgtactgcggactgagcataatccgcaaatatttgaagaaaaggagcgagtatgatgagtggcgaaaaggtaatttgccggagggtttctgatggtgtgctcattaacattccccatacgtttgatttgaagcagattgcagattccggccagtgcttccggctgaccgcactgcaggataggggatatgtggcgatcaccggtatgaagctggtgaaaatcacaccgagtaccaatggcgggtatgtttttcactgcccctatgatgagttccgggatgtatggatgccctattttgacctgtctgccgactatgaagcatatcagcagaagatggccggagacccgtttttgcgggaggcgatcgcagcaggtggcggtatccgcatcctgagacaggatttgtgggaaatggtagtgacctttattatctcccagcgtaacaacatcccgcgcattcgcaaagcggtagatgttctctgccagacattcggtacgccgctgggggagatcgacgaccagcagttctattccttcccgacgccggcgcagctgagaggtcaggatctgtcaccggcatcgctgggctatcgtgaaagctatgtgaaagagatggccgagtatgacgaagatttctgggtgcagctccagaagcaggatgacgatacggcccggaagacactgattgctctgcggggcattggcgagaaggttgcgaactgtgtgatgctgtttgggcttcaccgtatggacagttaccccagggatgtgtggatcaaccgcatgattgatgatgtctaccatggcaatttcgatccttctcagtacgccggatttgccggctatgttcagcagctccaattcttctattaccgtaagacggcgaaggaggaaagcgtgtgatcgttaaggtatgtgacacgattatgggagcaggtaaaaccgagtctgcgatcactttgatgaatcaagataaggaaagccgctacgtatttatcacgccatacctggacgaagtagaacgaatcaaacggagttgcagtgggcgaaaattcaaagatccgcaaagtaaaggtaagggtaagttggaaaacctgcattaccttctgtctatgagggataacatcgccagcacccatgcgctgtttgagtcgtataacgatgaaacgatttcgctgatccaagacggcggctataagctcattttggatgaggttttccaagccgttcagacaattccgatttctccaaaggatttgcaaatgctcaagcgggagatgatcgaggttgactctgagtaccgtgtgcggtgggtaaatgatgactacgagggcagatttgaagacttgcgggatatgtgcatgactggcaacgtcattttgtataatgactgcctcttgctatggaaattcccgattgaggtatttcagtccttcgatgaggtgatcattctcacctatatgttcgatgctcaggtgcagaaatattacttcgacattcataatatcgaagtccagcggatcggaacggtttgtgagaacggggtatatcatttcagcgatacacctcacataccggattacgtagcagaactcccaaagaaaattcatatcatcgaggatgagaaactgaataagatcggcgaaatgaggtcgagcctatctgtttcttggtataagaaagcgcgtgataccaaaggacagccgcttatcaaacagctgagaaacaatttgacgaacttgttcaagaatatgctcaattcttcatcagaccgtaacttgtggacggtttttaaggattaccaagccctcctgaaaggcaaaggatataccaagggtttcctttcctgcaatgtccgggctactaacgcatatcggaacagggactgcttggcctattgcgtcaacgtgtactacaaccctttgctgaaaaactattttcaggagcaaggagttgaggtgcgcgaggatgattatgcgttgagtgagatgatccagtgggtatggcggtcagctattcgtgatggcaaagaaatctggatctacattccaagcaggcggatgagggaactgtttcggaattggttaaacggcatctctcatggaaacacgacagactaatgcggcgtcaacgattcatttgatcatatagggaacttgaaatttaagagagctgacgcggcggtgtgtagcggaaggaggcttacaatgaacaccgcacgaaaaaattgtatttggtatgaccaatgtggctcggagtgccaggggaagtgtgatgactattctccggctgacgacgcaggggaaaacgaagtgttctatcagggcgttttgaaagagaacgctcaggagtacgaaaaggtaattcaggaatattcagacagggggtaatgtgtttgaaccgtgaaaatcgcagagctttgaaaaagaagctcagggacaaaggctcacgcacacttgctgcggatgtcctggaaagcctcggaaatgagattgacaaaaagattcgtgatggggatttggtcactctgaatgtggatcaaatcatagctcggaaggattatccgcgtatgcagggagagtaccgtcaattcgtggagtccagccgtgataaggtatttgttgcgcatccgcatcgtgaacgacccgatgggttctctgctctgatcgagctggagggcgtagagacctggttgttctggtatggggatctgattcaagtcgaaaatattcaaactgaggaaggtgaatagaccatgggtaattcggtctatatcgtgtctgtggatgccaaggatttgtttttggcgaactattcaagcccgaacagtaaggaatattctgtgaagctggctggatcagaccacaacgaccagttcaatacaagacgttttgtcaacactttggattatagcctcgacctgataaagctgagggaagtttatgagaaggtataccgccgtatggacttcacattcagtaagcggggtaaagaatactgccggcgcgtgatcaatgtcacgttcaagtatagcgtcaaggagttcaatcgcttctttgacaacacctacatcaagtatggctatctgccgcaggatgtgcagcttaccgacaacatttgtatcaaggatggggaactgattgctgtacgggtaggatctcccgtcgaaaatccggcctctccccaagagctgggagatctgttcgtttttgataacggaatgtatcggctcgggaaaaccatgaaggtacttcttaccgtagcccagcttcggaatcgtctttatcaggacggattcacgtgcgatggtattgtgttccgtaggttcaagcgttcaagcgggagcagccgaattggaaagtgcctgttcattgatgagcagttgtatccaagaatgcacaagtgggagctttgtgggctgaaagtgaaagagggtcaggagattgatctggccgctctggaagcctatatcgcccttactctgagcagcatcgttggtactattccgctgcggcccgagaacttcttggtaatcgacgactataagagcgtgttcaaagatcgcgttgtggcgacaaggattggcagcgataactggcttacttcaaagccggaagaggttgagatcgagaatagcatttgggacggacagtctctcattgacaaaagtgctatgggcgaatggcaggattacggtatgatccttctgcggaaccggtttttcaaatcggcctgctttaataccaatatccagaagtttttcgctgatcgtggcattactgatgtgtcccagctttccggtttcacgctggcgcaggatatcagcgatatcaaggttattactacgcccagtagtattaagtacgtgaagtttggcactttggaacagtggctgagattactggacgaagacggtaactttggtgtcgtgaagcatgagaagccgacgcatttctttgatggccgcatggtgcagatccattaccagcttttgaatactcttcagctttcgcaagatgatgttgaccagttggtaaaaccgtcgttggattatctgcgcatgatccagacagatcctgcggtgctgcggtaccatatcaaatatatgggcgggaatgaggagatcgacagcgacggaattacgacgacgaacgatgtggtatatcagatgttgggcgtcacagataagttttctcaaacgaagctgtaccacaacttcaaaaccgacgtatcgaagtcgttcaaaaaagagctggcccgtggacacatccttgtagaagggaactattcaactctgctgggaaaccccatcgaaatgctctactctgcgattgggcaatttgatggtgagagtaaaatcggagtaggcaatattttttgccaacagtttgcttttgatcagactattctcggatcgcgcagtccccatgtgacgatgggaaacgtactcttggcgaggaatacggataacgaggagatccggcagtacgtcaataccacacgagagatcgtgtgtatcaacagtatcggcgagaatattcttttccggttatccggtgcagactttgactctgatactatgttgctgacgaacaacgccatccttattcgggccgcagaacggaactatcacaagttcctcgtcccgaccagcatggtagacgctaagaaaatcgtgcgtcattataccaaatcagatcagtctgatctggatatcaaaacatcggtcaataagatcggcgagatcgtaaacctctcccaagagctgaatacgaagctgtgggatgcgctgaacagcggagcagatttttccgagtatgaggagctttactgcgagatcgcccagctggacgttttgagtaacatcgagattgataaagcgaagcgagaatatgccgtagacagtgttgcagaaatcaaacggttgagaaaaaaatatgagatacgcgacgatgatggccggcaagtaaagcccaactttttcgggaagatcgcccgtatgaagggctattatgacagtgtgggcaaaaactatcgcttccacaatacgacgatggactttttgcagcacagcctgaactcttaccgtacaagctatgcttatacgtcgttcatcccgttttctgaactgttggtaaacgacgcctatctgcaaaaatctgtgagctattcacaggtcgagcggatcttggagtttgtcagagatatgagatctaagatccgggcagtttgggatggaacagacgaaaacctggataactacggtaaggcaatcctggtacatgagattcggcaggagtatatcaactatattaagtcactgcggatcagtcctcatactgcatatcggttgatgctcgccattgaggagcctcagaataaagatatctcacgcaccttgttttatacgttgttttcggcacctaatcagtgctttttggacttgattgagcagagtcgggcacccatttcaacgttgactgaggtttctgacggcctgtgggacgtggaaatttatgggttccatttccgtagagaaacggcgatatgcccaaaaacaatgtccgataactgttgaattttcacaattttatacagattttcgggtttgttggtcgaataattctaaaaccacgttgggaactcccatttgttgtcgggagttcccaagtcctaaatttggtgtaattttgagggagtaccctcaaatttattagaaaaggatggttctcgtggttcctattaacaagacagagaaagatctgctggtcaaagcgttccctccgcataagtatccccactactactgttatcctcggacgatgaagcaggactcgaagaggggtcattatttctgcgtcgaatcccctgagctgcttgcaaagctgaacgaaattcgtcgtatgaacgtgatcgaggagcacaagtaaatggcggtgcgggagcagcgtgaggtatattctcacgcgacgatcgactgctccgatatgacgctgacggagtatgacgtgaatggtgctcggacttacgatatcaaggagatcttggagcgttgggccggcgtaccaaacattgaaattgaaatcaggcagagcacgcttctgccagcagaataggggtgaagacattcgtgaatccaaagtatgaacgcagagaaggtgaggatgcatatgaatatggtcttcgcctaatcgaaatcaaagtcgaacagaagcccgacgatctggactgggaagacatcgttgaagcaactggcatcgaatgccatcgggatagtttgagaaaggcggcatctgtaacgccatactccggctatgctgttgcgcagtatttcaagaaaaagtatgccgctcagggtaatcccggccaggatgattatatgggcgagctaaactgcaaaattgcggagatgcgtaaagaggccaaacgcttctatgaccagcgccgcgagttcaataagatggtcgatcggatgggtcgtgaggaaaatctggaagatcggctcgttaaggctgctcagaatctgaatgagtctttgccgctatcggttaataagccggacgacttttgtatgttccttggcgacgctgaggctgttcttgtgtttgccgactggcattacggtatggtaacggacaatatctgggagcggtatgatactcaggtatgccgttatcgtgtggaacggctggttgagcgagcagttgagcgtatcaggctgaataaatgccatagacttcatgtcgtgttgttgggcgacgcggctcatggttcaatacacaccagtgcgcgtgttgcctctgaggagctgacgtgcgaccagatcatgcaggtgtcagaaattatggcacaggcgatcagtgttttggccgatgaggttgagcagacagtagttcacgcgacctacggaaatcatttgagaaccgttcaaaataaaaacgacagcattcatgcagataacatggagcggctgatcccttggtggcttgaacagcggcttcgtgatcgcggtgatatcgttttcccggagtcggagtattacgagttcttgtacttctccgtatgcgggtataacatttgtgccgcccatggtgacttggacaacgtgaaaaacgccggaaagacgctgcacacgctgttcgccaagaagtattccagcgatattgactatgtggtgttggccgataaacaccataaagaggagtttgaagagctgggaatcgagagtatgatcgcaccctgcttgtgtggtacggatgattatgctaacggaaaacggctctattcgactccggcacagctgatgatggttttccgccccggagtaggtgcggatgcctgctatcagatcaaattgaattaaggagtgggacaatggttaaggccgatatcgtgtccgctctgtgcgagaaaggctactacaagaatcaggccaatgatgtggtggacgaagtgctccaaatcatcagagacgcgctggttcgcggggagcaggtacagctcagaggtttcggaacctttgaggtgaaaaccagaaaaggccgcaatagcaaaaacatctccaccggggagatgcgggtatcgagcgatagcaaggtgcccacgttccgagccagtaacagcctgaaagaggatgttcgcgccggtacagactcgcagcagtgacacaaaaaaatataaaataattttctttgtagctattgacatccagaaatgcctatggtatcatatgaccatagcgacaaagaaaatcaacgaaaacagcgccgccccttattagggggcggacatatggggccatagctcagctgggagagcgcctgccttgcaagcagggggtcgggagttcgatcctccctggttccaccactatgctgtattggctaagttggcgtttgtgcggttcagctcattacttttactgctatctcagccaaaagcctatcggctgcagacgaggtttttcggacgtacagctattacggcagatgcgtctgccgtaatatcgggatatagctcagttggtagagcacacgattgataatcgtgaggtcaaaagttcgatcctttttgtcccgaccagtcccattcgccacaggaatggtattttgaccgaatgccgatgacaaggcgggagatacggctgtggcacatatctttctctatgaactgcaagacttccccttccaagtgccgataagattcgccgtctgggatatgcagggattggggaacgtggtcgggcagcgcctacgcccgaaccggtacaccttgacaatttcatatggggccgtaatgggttcgacggggttctgagagagtaagactcgcaggtagaagaccgcctcaaggcttaaacaaaaatgaaatgacaacgatacgactgttgtaatgatccatcccgctttttccgctgctcttgcagcaaagggaattgccgcctgacgacggctggattccaaaacgatgtacccactgaccgggtaaacatctgaggtcgaagattcggtcagagtattgcagttttccttgtcactgtgaaaagaaacaaggtggtggaggtgcatctaaccggtgcgccctgggcgcggagtgacaactgctgatccgcccgtctcagtttgaggcgaattgataaagtgttgtctattgcgtaagactgttttattcatgtagggatttcggacaggggttcgattcccctcggctccaccatatatagaggatgtagtgataacggtagcacgcctgcccagggagcaggaagaacggttcgagtccggcatcttctaccatttttggggcacgtacagcaactttcaaaaactttttatgggaaaaagaacaaccgtgttccgtattttgagacgctaacagcaattttgaaaacaattctacttgaaatagaaaaatcatcgcctttaactaagcatatgccgaacaaatgtggtgtcgttaagaatgcgtctcgtagatctatattggcccgtagctcagatggtagagcgtctgactgttaatcagatggtcgcaggttcgagtcctgccgggtcagccatattgcggggtgtagcagtggtagcttaccagcctcataagctggtggtcgcaggttcgagtcctgcccccgcaaccatgcccgtcccacgaacagagcggagactgtaaaccgaatgggaaatagaaaccttcacatctggcagtgatgacttttacaaggttttgggagtaaaaccggcgcaatccggcaggcgaagtacgagccggcaccatggcttacggtgtgagtaagccgatctgtccggttagctcagctgggagagcatttgccctacaagcaaagggtcggcggttcgatcccgtcactggacaccatatgcgggtgtagcacaacggccagggcaccggccttccaagccggggatgcgggttcgatccccgtcactcgctccatatgccggagtggtggaatcggcagacgcggaggactcaaaatcctctggtagcgataccgtgtgggttcaagtcccaccttcggcaccaaggcgtatctgcattaaatcacagccctgcaccattttttcggttttgatggtcactcgacccagtgccagcactgggatgagagggttgcaatcacgaagtacaagtgatgtgagccacgcaaaccgtatatggcagtatgactggagatggctccagcacgacctcatacgtcgtaagacgcaggttcgagtcctgctactgccaccacagctctcccattttgggcgaaacgatattataaatagcggtggccttatgagtggggcgttaatcaatggggctgacatccattaccgctgaagtcagcttatgataccgtagccaagtggcaaggctctgggctgcaaccccaggatcataggttcaaatcctatcggtatctccatattggggtatcgccaagctggtaaggcatcggactttgactccgacaagaggtttaccctcgaccgcaggttcgagtcctgctaccccagccaataaaataaatgcggtggcggaataagtagacgctgtgggcgattgggaaggtagacgtggaagtatcttgctctgcaaggggtgctatcatgcaaggtgtaaatccttgcccgcatttttatatatgctcccatcctctaactggaataggaggccggcctctcaagtcggcaatacgagttcgagtctcgttgggagtaccagaggtggatctgtgaaggggcttgtgcgcacaagttgttataacagaaagagtagtctcatgaactgcttgccgcaataaggcttccaactggaagcgccttgccataatttataaagcaggtgcaatcatgccgaagaaagattcgggcgtaacgaaagaaaaaacatcaaaaatcgttaaaaagatttccgcctctgagtgcggtaccggtgtgctgtgtacaacgaggtcgggcaagcagtatcagatcagccaaaatccagaaaagaagaagcatacgctatggcgtattgtggatggcggatatgagaaaattgcgactggggattcgccctatgatctataccctttaattgattgggacaaataaatccaaatatgctgctatggtggaataggcagacgcgccagcttgaggtgctggtgggagaaatcccgtatgggttcgagtcccattagcggtaccaacatggtgcgttggacgaattggtagagtcaccaccctttcaaggtggaatttccgggttcgatccccggacgcatcaccaaagcaacctaaattggttgcaaaataaaaatgcaaccataaatggttgctgtatatggcgtgttagctcagaagagtagagcgctggcctgtcacgtcggaggtcacgggttcaagtcccgtacacgtcgccatttttataggggtttggtgtaattggtagcactccggtctccaaaaccgatgtaggtgagggttcaagtccttcaacccctgccatgctgacatagctctaatggtagagcggttgcttcgtaagcaataggttcagagttcgagtctctgtgtcagctccatatgctggtgtagctcagttggtagagtggctgatttgtaatcagtaggtcgggggttcaagtccgtccaccagctccatatgcgggtatagctcagttggtagagcagctgactcttaatcagaaggtcgtgggttcaaccccctctacccgcaccaatataagaatagtaaatataggggagcgccagagttggagagctggggcggtctgtaaaaccgttgctttcgagctgagtgggttcgactcccacctcccctaccatacaaatatttgttgctacccgatatgcaactgaaataaggtcgggttcaaattgacgagtgggtgattcaatgaagttcccgtttggatctttaatgtattatgtgtccccggtgaatggagcaaaaacactttgcctatacattcgagacgatcatggaaaggctgttgtgttctttgagcacgcagaatgggcagctcgggttgggtacgatcagcttgaaaaaataatgtgtgcctaaattttacaagtggcggaattgaccccagtaggtgcggggagcagtcttgaaaactgttggtcgtgatgagcggcttgtgggttcgagtcctacttccgccgccaacgggatgtgttgatatttactgctttctaacgaccccaagacaaacggtacgaaagcggcgcggttccagcgataggggacggtggactttgctacgctgtcctgtgcaatgccgataaacaaaaatgcgtagcgctatgggatgatagctcagttggaagagcggcaggttgaagccctgcgcgtcggaggttcgattccttctcatcccaccagtccgtaaggatactacctatgatgacgtgtgacggctctgacacgtcggtaaaataaaaattggccgtgtgcaggtagattggggtcgctccctccggtgaaagtccggcgcaggcaaaacgcgatagaccaacctaaacgctgtaagcaaagcggcaagccgatcaggagcgcggcgggctggcataccccaacgggacttcgtgagcctgggaaagtatgcccctctaatggtagtcagcaatggaggataaataagtgtagtaaccgtgcaaatcggaattattgcctgattgagataacatatcacggctgtgagtggcggtcggaatccaaggtaaaggtgtgtggtgaggccgggagtggagtcacttcatacaacatatgcgcctgtagctcagttgggagagcagcgcacttttaatgcgtgggtcgggggttcaaatcccttcaggcgcaccagaagaaataataacgattgagaaaacctcggagtctttggacttccgaggttttgtcatatagaaaggaggtcgcggacatggcggcaaagaaacagctgatgaaaccggctacgcaaaaggtagtgaaagatgcgaagcctaccgaagttgagccgcgtgtaatcagcgatgaagaatatcgctgtacctgctgcggccacaagtacaaaaaacaggagactaattttggccgttcaaagtcccctatttataagggcaacaacggctttgtctctatctgtaagaactgtgttgcagagctttacgaacagtacgtaaagttctatgacggagacgaagatgcggcggcagagcggatttgccagatcacggatatgtactttgatttggatatctgggcgtcgtcacgaaagatcagtgagagccgcaatggaaagagtcgcaatcggatcagtacctatatttccagactgaatttgagccaggtagacggagcaacgacctactctgatacattggtgcggcgctgggaagccaatgtggaaaacgcacctacggtggaggatgtggcaaaaaatgacgacatccagacgcccgaggaggttgtgcgccggtttggtgtcggttttgatgctggcgactacgattctatgcagtacgagtatcaggattgggtaaagcgatacggcgagccgatggataagcggcaggaggagctgtacgtttcgatctgctttatgaagctcaacctgcggaagctgcttcagaagggggattccaacattggtacggctgcgaatagctacaagtcgcagattgacgcagctactactgagatcgaagaccggaagaaaaaggctgaggctgaaaagcagctgagtcctttgggagaaatgattcgagatatcgaggagttttgtccggctgaatattacaaggacaagaagctgtatgcggacttcgatcatttgaaggagtatattgagcggttcatgaccagacctcttcgcaatctattgaccggctctaaggaactggacaaggaatttagcctgtctgattcggaggagtgagttatggattacgaagcgttgatggatgggcgacaaaaacacgtccatgaacatttctcacccaatagcaaattgaacgaccctgagtttgtcaaaaagctattggattggataacgttttggcgaaggaaccccagccgctttgtgcagcggtatttcggaatcacactgtatctctatcagcacatcattttgtatctgatggatatttttccgagtatctgcattgtggccgctcgtagtgcggcaaagtcatttatcattgcggtctatgcctgtaaagaagcaattttgcggcctggatcattgatcgtcgtagcttcggcgacaaaaaagcaggcgagattgatcgtatcagaaaaaatcgccaaagagattttgccaagatctccgttgcttcaacaggagattaagaccatcaaggacaaccagaacgatatcgaagtgaagtttaataacggaagctctattgttgtattggttgccaatgagaatgtgcgtggataccgtgctacggtcttcatttatgaagagttccgtatgattgtgaaaagcattatcgacacggttctttctcctacgctgttccagcggcagattccgttcagaatcaagtaccccgacgagtacaaagaactgaaagaggaaccgaaagaaatctatatcagctctgcatggtacaaatctcactggatgtgggattacatgaagctcgtgacccgcgatatgttgggcaagggcaaatctgttctgattggtatggattacagcatcgctttgaagcacgagattaaaacccgtgacttcttggtgaaggagcgaaagaagctggatagggttgcctggacgattgagtatgaaaatcagatggtggccgagaatgctcatgcttacttcacctacgatatgctgaacaagaaccgtgtgttgaaacgtccgttttatccaaggaagaacgaggacgtactgtcaaaggtcaaggcaaagcacacaattcccaaacaggcaggagaaatccgtattatcgcgtgcgatattgccccggagggcggtaccggcaacgataactcggtatttacttgcattcgtgctctccctgagagcaaggagtataaggtctcagataccagcggagatcatattgaggtcaagcagggatatcgtcggcaggtagtctatatggagccgcaggcagaatttgaaacgacaaaacaagccattcgcattaagcagctgttcgctgactttgaggcggattattgcgttttggatacacgaaacgcgggtgtcgctatttacgacgctttggctaaagtgctttatgacgtagatcggaacgtagaatacgaaccttggacgtgtatgaacgatgataagctgaaagctcgtatcgtaattgcaggccagaaagaggcggtattctcggttaaggcgtccttggagctgaacagcaaaattgctgtctctatgcgggatagtttgaataaccggatgatcgaactcatggtaagcaaccaagagggcgttgaagaattgcagcgcttgtatcctgagtatgtctctgccgatgtagatacccaacttttctatgagcgtcctttccttgagacagtggcgttgatcaatgagatgattgggttggagtatactgtgcagaaccagaccaacctcattaagattgaggaacgcccaggtgcgcggaaagaccggtatacatcagtatcttatggcaactatttcgtttcacttttggaggcggatcttttctcggatagctccgggtatgaatacgtaacactttgtaattaaaggaggtgaagacaagtggcaggaaaatcattctttggtcggattatgggccggaatcaatctgaaacgcaggccgcagtacctatgtcgcaagtaaacagtgcgccgcaggacgacaagacctatgagttcaacacgcgtttgggttcgtcttatttgaacgtggtcaactacggtacgaaatgtacggcaccgtattccacggaagaaatcacgcgaatggcgagagatcctatgcagtacatctctgaattgcgtcaatgggcgaagtgggcgtattactcaaacggcacggtgacgacagctattgatagcctggttagtcttcactcccttgattatgtggtagttgttaagcccaagaaagcgggaggcccccgtaaagggtatcgtgccagcatggacaagatgaccagcgtactccggtcgatgcgctacaaggaggttattcgtgacggtctattccacgatgccaatgagggtatgtacgtggggtacatggagacgagaacagtaccagtagacgatcggcttgcgctgactgatcttgatatccaaggcatcaccgagattaactcagccggcgtcaactgtgttgttatttctttgccggtagaatatacaagaatcattggccgcaggaacaactgctacgaagtagcgtttgacctgcggtattttagcgccatgacagagggagatcgtaagcgtaagctgcaaggcttccctcgtcagattcaagaaggatggcgcagatattccaatggagagttcccggatggtgcgtgctggcagagactggactggcgcaagacgattgtaaccaagatcaagagcggacagaacgatccgtacggtgtgccttttgcagtagccgcgttggacgatatcgactacgccaaatacttcatcaatacgaagcggcgtgtgttggatacggtcaataaccagatttactatgagactttccccgagggaaaggacaagggtacatctgctctgtctcagtcacagcaagaaaaccagcataacacagtcaagcaagcgctgacgcaacgcagcaacacaaacggtgtatcattcttctctttggcttctggcacaaagatggatcggcttccggttgatctctcccttttgaatgaggaaaacgaaaatgccatcaaagaggatgtgaatgaggacatcggcgtggccgctgctgctctgagtggcagttctacgggtaactatgccacggccacactgaatatggaaatcgttgcgaataacgtattcacgtggattgaggctttggtggaagagctgaacaagtgcttgaattacaacgtaatcagggacggcagctaccgggtggagttccgggtgcttcccattacttttgtcaatcgagaaaaacaggtgaagtttttctctgacctgtatgcccgtggaaagggcagcttgatggcatggattgcatctacagggtttgacgtggatgactacctctctcttatggatcttgagttggatgaagactttgagaacaagtaccctgtgcataagacctcgttcactgttaccggtaaggatgcgcctgacggtgatgtggacaagagcaccggtggcgatcctccggtcaattcaagcacagagtctacaaaggctaataatgctaacgcaagcccctctccgtcaggataaggaggtgagagtatgtctgagagagcttttgcccctatctatgagatctccagtgaaaataagattgccggcagacgacctatcaaggttgtattgcatgagatcttccctgataacactcgttggcaggaaaacggaatctcgtggaaagaggaatatgttcaagctaacctccactccgttgtcggaatgtcgattgtagcggaatttttgaccgaagatcgggacgttccatacaaccacggtatgacggatgtacgggaggaggataagctgcctttgtttgaagacgccactatggttggacacttcgacaaggcgtatgtggatgacgtagaaatcggaggcgttactaaacgctgcttggtagcagaaggaacgctggatgaaatgcgttatcccaagtttgttgcttggctccgcgaaaatatggcggactctgttgttaagggttccgtggaaattgtgggtaagcccgagcacgatggatacattatttactccggcggttggaaagaggaaggtcgtgttccgcagtattacgattacagcggatatgcgattctcagtgttaaaccggctgatgaagccgccatcgtaatggagctaaataataaaaaactggacaaggaggatggaacaatggacgagaagaccaagaacgagttgatggcggctgtgactggtgctgtctctgaggtcaactccaagtgggaggagtattgggccaaagttgacacgcttctggctgagattagccagctgaaagctgacatcgcacagaaggaagctgatatcaagcagcttcaggcggattacgacaaggaagccgccgcgaaggaagcggcagaggccggactgactgaggctaacgccgcgaaggaagcggcagaggccagcctcgttgaggctaatgccaaaatcaccgaaatgcagaacgccgctgccgtggcagaactgaatgctgcactggctccctacaccgaggagcaacgtgcagttgccaaggaagatatcgacgctttcaattccaatcccggcagcgtagagatcaacagcatcgttggcaaaatctgcaccgctatggtgcaggcggctcgtgagagtcaaatcgcagaaaccaatgccgccagccagattgacgtatttggcatgacggatgacgccggcaagaaggagaacaccgatcccgccgacgtggacgtattttaagaaagggatgaaaaacaatgaaggctaagacgattggttactacaagaacgtgcagaacgttggcgacgttaatgccgccgtcgatctgaaggtcggcatgggtgtggtgctgaatcgcgccgctcgtactgccaacctgcccgcctctgaggaggaggctaaggcttgcttccgcatcgtgagcaatatcaacgacaagcccgaaatgcgtaatttcgaggagacgttgacggtcaaggccggcgagaaggtacgcgccgacgacctgaccactgtggcaaatctggagatggagtttgccagctatgagatcagcaccgactatgccggcatctctgttggcgataagctggtctttggtacggatggcctgctcgctaagagcaccgacgtaaccggttacaaggtgtacttcgaggttacgaagaagaccgcatacatgggcaagggcgtcctcgtcgttgtccgcgtgcagtaagaagagaaagagagggataaacgatgagcacgatttatgaaatcaacatgagcaacgctcaggctgatgtgaatactggtcgtgtcaagcagaactccaagatcgtggaggtattttctgctctgagcgccggtaagcgccccgaggttgacgacaagactctggacaagagcgtggcaaccatcaaagagctgtccagcaaggctatcgacggcgataacgccgcccgtagcgaaatcaactccatcatccggttctctattgagccgaagctgttggaggttgttcgcctgttcgacttcatgggcacatatcgccggatcggttacaacgaggctcccatgatgaagacctacggatacgagagcatcgattctcgattccaggcatccagcagcgacgtacccttcgccgctgtgaattggcgtgagtatccgatcggcacccagaccatctctgccggttttgctgttgactaccgcgagcttcagaacggtaacttcgacggcaatatccgtgagggtatgaaccaagtgcagattgatatgcagaacaagatgacctactacgtcatgaccgttctgtacaacgccctgaaaaacgccaagggtgtgaagcacttcgctgaggacaacggcatcaccaagaccgctgttgacaatatgctcaagtccatgcgtcgctatggtaaggtcaacattgccggcgattacagcgtagtgtctcagttcaacgacttcgctggcttcaagcagttctccgccgatgagatccgctacgccaacaacattgttgccgaggaaatccgccagactggtctggtaagtatgtacaacggtgctttcgtaaccgagctgcccaacgcgatcaactggactcagttgaacaaggacggcaccgattatgacctgtatatgccccagggtctgctgttcttcctgcctcgtggttctgtgtctcctctgcaggtcttcctgcgtggcggactgaccaccatgactggcgacgacatcgtaacccgtcagcacctgacccgcttcgatatggagttcggcgcaggcgttgccgagggcatggaagatcagatcggtctgatctccgatacgaactttgatgctcccactttttaagtgagaggtctttttttatgcctgaatgacggcacaaacggggaggggcgcaaacccctcccctaatttcaatcaaaggggaatcgttatgaaaacgaataatgttctggtaaacaacctttgctcctggcctctgggctttcggcgtttggcggggcagggcgatatcgcaattccgggcaaagctcggaatttccccctcctctccgaagaggaggttctggctcagatccaaaccggcaacgtgatgtttaccggcactgatggtatgggcaatcatgcccgtattcagatcgtggacgaggcaaagcgtaaggagctgttcggcctgggcgacgccgaagtttccactcctatcctcttgaatgaggaaagcgttaaggaactgttggctattcgctccaaagccaagttcaacgagcagctggaagctatggtgaaaaccgacgccgaaaagagaatgctcgtggagctggcgtttagtgcgggcgctgaggacgcggagtcctggaaggtggacgctctgcgcaagctggctgagactgccaaggtctaaccgatgaaaggaaaaggtgtggattatggcggacgaaaagaaaacgacctttgcggacgttgagcaaaaattccactccatgcctttgactaaatatgagatcccggaggcattggaagcagaatggctatccacagcggtagcagattttgaactgaatttgggctgtgacctcgggtataacgaggagacacgcgagttttctggcaagttgaaaagtattgccgttcgtactctcgcccagatgatgtatgtgtcttacctgcaaagggaactgagcagggtaatggcgctgaacgggatctatggaaaggatgttcagctaaccggccaagatgcgaccaaacgtgtaacaaaacaggaacttgacgaccagattgccaaggttgaagttttgcttcatcgtcagaaagatcctgcgtatggataaggggggagcaatatgtcagaagaatccaaaagctggtatcgaatgacacgccctcttttcaacagcgggtttgaggatgatgagttttgggcatacggccaagatggttttcaggaagtgctcgattcctttatcgggtctgatattttgatctacgataaggcgattggaactgagccgcagcaggtaagagctattgtccaacagaaaaccagcgatgtgtataacagcacaacggttagacagattctttgcaatatcggtatcttgagatgtgggcagtacgtgaaacacgacggggcgttttggctggtgagttcgctgccggataacaaccgcatttatgaaaaggcggtactctggaagtgcaaatactctatccgattcgtctcccctttgacaggtgagattgtagaataccccgtatatagcacaaacagcacacagtatggcactggtgaggcgggtaaaacgcagatgacggttggtgaagaccagcacctgatctatctgccatacaatgaagaaacgattatgttggacgctcagacccggctcttgatggacaagaacaaggtcgatccaacagcctatcgtatcaccagagttgatccgatctcgtatgcagtgggcgacgaacgtgcagaggatggcttgatccaatgggccgtactggaagaccaattcaatgccgctaccgataacgccgagttgatggtggcggattactatacttctgttcccggtgggacagaggaaacctcgggagcaagcgtccatatcacattgacagacctggacggcgatttcaagatcgcaggcggagagacaaaacaaatccgtgtccaagtcttggatgagagtggcgttcctattgatccactccaatatcgtttggagtatgactttgctggcgcggccagcattgtcgatgagatgaacggcgttatcacgctgcgggcgtcggatgatcccgtatttgtgggaacacaaattgagatcaaggcaatccacgacgcctccggcagtgaggccgttatgaaaatccaaattgtgaactggtaaggaggtgatgagggtgccgcattttgattcgatgattcaacagaagatcttgctgaaacgaaagctgctacaaaatcaggcggtggtcaatttgctctgtaacgtagggaacaacgtggcggagtttgaggatttcaaaacgggtagtaaaagccctgcggaacccctcatcaaaacccacttttatgtccctggtacacaaacagatgacaaaaactttatcacgatgcgtagtcgtgtggtctataccgactcgaatgtgattaaggagacagggattactgtctatattatctgtaacgagcaccagattgacttgctgcagggttccagagcggatctgctggcagatgaggtggatcgcattttgaacaacggggacaagcccctgttcggactgggtgggatcaagctcagtacggcggatgaggttcagttcaacgaaggatactccgggtggtcgatcccgtacgttacccacgagatgaatagggaggctggtatcattgattgatcagctgaaattgtttcgtggagagggatacaagatcaacgataaaatcttgatcaggcaacccaccttggaggaaatcgtagattttggcgagcagcggtatttcggactggtacgcactatttgttcgacacccgctgatcgaaaagttgaaatctgggacaaacttcatgtcttctgggagaagatagacgaatacgaccttttcatatccctttttcagacgcttcaaaaatctgaggtgtctatcctttttggggatatggacttcacaacctttaagctcggtacacaaacaggtctcccagaccttgtactgaagaataaagatcaagtggtgatcgaccgagctattcataagctcatgactgactatctccgtcaaatccataagctgaaaaagaatgtggatacgggatttaatgacgccacgagaaaaatcatgattgaggatgacagggatgaaatggcactgcaaatgcagaagccttttcaatcattactgctacctcttatctcttctttgacaaactgcccagaatttaagtaccgatgggatgacgtatggacgttgcccatcggtgtttttatggacagcgtagagcgtgttcagaagcataagagctacaacttcgtaatgcaaggcatttacagcggttgtgtggatatgaagaagctcgacaaaaaggaactgcattggatgggggatctgaaatgatcccgaaaaaatacagaaaggacgatgaataccatgtttaacgcaactcaatttgttatcgacaaggtacgtcggatcactcagatcaacctggcaacgggtttggtggacttcaccggtacgagcgtggagagtccccagatcgagttcaccggcgagtctaccgacaagactgacgctcagggcgtcctgctcgcccgtttcgacaccgctaagggtgtgaacttctctggtgagctgtctctgctgaacctgaacctgatgggcgcacagcttggatctgaggtacaggtggccgatagctccaagaaggtcaagggtgccgactttgctatcctcaccgtgacggacgacaagggcaccaagaccgctacgctgaagcacgtgcccacttctgcccccgctgccgtgtacaccatgagcgaggacaagaacatcagcggcatgatcgaggtcggcgttgatgagggtaacgccaagatcgagggcaaggttatcactctgcccgcttccttcgtcggaaccactgttggtgtgttctatgagtacgagacggattctgccgtcaagctggtggacagcgccgagagctttgccgaggccgcgatgtatgtcgtggacattctggctgctgacgtgtgcaacccgtctgtcaagcgtgccggtaagattgtcttccccaaggccaagatcgacaacaacttcacggtcaacctgaccacggaaggtacgcaccccttctccttcactgctctgaaggattactgcgccgacgacgcggagctgtgctacatcctctttgaggagtaaggcggtttaccatgattcggaattgcaaggtgtgcggcgcttcgtacaaaacctgctattcctgtgagaaagagcggagctggaggcttcatactgacacccctgagcactactacatttggacggtgctcatggggtatcaggctaaccacgatgcgaaacaggcatatagcgctcttcggaaacgcggcatcgaccttcgtaatacggcagaatatacgccgagtgtgcaagcactgctggcggaaatctatgctttggcgcacgaaaacagtagggcaaagaaagcagtagtcgaagcggaggaaaccaaggccgaagaacaggtaaataacgaggctgagtcgcagcaggagtaatgggaaggagggcttcggccctccttttcagactcataaagaaaggtggtgagacgggtgaaaatcttggccgttgaccaagccagacacggcgcatgggcggtttatgactatgagggaaagaaactgctggactatggggcgtggggctttgataacaagaactatacattcgagcaggcaattttgcacattgaggctttgcttagtgaggtgatccgaacgcacgacattgatgcggtgtttttggaggacattcagcttagaaagaatgttcaatctttcaaaaaactggctcaactacagggcgtactcgtgaatatgtgtgaaaaaacgaatattttgtacaatttggtagcacccacacaatggcaaaattactgcaaagcaagaggtaggacgacaaaggagatcaagtcaaagatcacatctgtcgaacctacgggcaaaaagacatcaaaaatcctatcgctgcaagctgcaagggatatttatgagatcgttactgaaaacgacaacttggcggacgccgtgatgattgggcattacgtcgtaaacaatatcaaaatcggaagcgaggacgacttcaatgaaaaagaacgagatgactaagaagctcatggaggagtttaacgaggattttatcgacgtggggggggtattagacactacgttgcctgatcccaccatggtggaatattatcgccgattgaaaaagcgcgagattctttggaatgacgatatcagcgacgccactattgatatcgctttgtatatcaaaaagtggaatgccgaggataaggggattgcgccggaagaacgtaagcccatcaaaatcttcatcaattcggatggtggcagcgtggacacggtgctccacatcatcgacatgatccacctgtccaagacaccgatttatacgatcggtatgggccgagtgtacagcgctggcggacttctgctgatggccggccataagcgctatgtctttcctcataccagttgtctcattcatgatggatcttccggtgcgatcggaagcatcggcaaaatgttggacaacttggagtttaccaaggaattggaaaaacgcatgaaggagtacatcttgtccagcacccgaatcacggaggaagtctacgaccagaactatcgccgtgattggttcttgttcagtgaagaaatgatcgtgttgggtattgccgacgagattgtaactgacattgataccattctttgataggagtgaagaagatatggcaaagaaaaataccagcatggaaatctatgatgtccccgctaccctgcaggagcatcctttttatggactgagactggatgaataccagaaagtttttcgggatgctatttgggacacggagaagctgattgtgttttgcaatgctaaagctggtaccggcaagacactgattgctacggccacagccaatttgctttatcaatacggacggtgtaatggcatcgtctatattgcctctcctactcaggagcagaagcaaggatatttgaagggcacgattgaggaaaaatccgagccgtattttgagccattttatgaagcattggaaaaaatcggtgtaaatcgcaatactgcattttacgatggtgcagtcaacgagaagtatcaaaccgcatatatccagtgcgctacgcacacgtttctgcgtggtaccaactttgagaacaaagtggtaatcatcgacgaggcgcagaactattactttgacgagttgaagaaggttctgactcgtttacatgacagttgcaaaatcatcgtaatcggtcatgaggggcagaatgatttgttcgaccacccggagcgctccggttttgtcccctatctgaactggtttgcaggtgatgatcggacggcggtatgccgactggtagaaaatcatcgcggctggatcagccaacacgccgacgaactgacgttccgtgtggcaatgaatcttgtggaggatcaataaaatgaagaaaatcgctgtaaatacggtgaaagcctttctgaaagagaacaagaaggaagatgcttacacccaggcgtttactgtgggggacagctcttttgaggtgtcattccatacagctctgactatcgcagagaagagcacctttctgaatcgtgtggtttctggatgtttcgatgcgacgggcaagttccgccctgagtatgtctcgcctatgctgcgagctaccattctccagatgtgtaccaatatcccggccatgacgctcaaaaacgagacagatgaagcgggtgcttccgctttggatgtggatgccatgaatgagctgtatctggctatggacttggatcacgttcagaacgccggatatcaggatatgctgaatgagatggttcctctgtgcgggcaggctattgactggaaaaagagcagtattcttgccgatcatggtacggatacagctctccgcgatctgctggagggattggccgataaggtgaaggatatcgacacggagtcgctcatgcagtatgccggtatcctttccgaaggtaccaaaggactgggtgaaggtggaatcctgcaaggtctgctgaactcaagaaaggcgtaagcaacaaagaaaattattgagtgggaggtggcggcatgaacgttcgggaagtgcttgaaaaggcaaacaagcagcttatggcaaaaatcgacgacgcaatgacaaaagaagtctttgaggaagtccaggatgaagaagctgccaccatctactctgaggtgtacaaggtctatacccctcggatgtaccgtcgccgtggagaatacggcggattgggagatccctacaacattgaaatccgaggcggagcagcaaagggcggcgtgatggtcgtggtcaatatgactgaaccgaatccgggtggctgtatgaacgacgatcaggtaacgactggtaaaaatctacccgagctggtggaatttggagacggttataaattctatcactatgattttcccagccgtaggcgctatatggagcctcgtccttttactgcaaaaaccattgagcacctgaaagaaagccgcgctcatgtaaatgctttgaaagctggactgagacgacaggggatcaatgtgaaatgaaatttaacagaaaaaggtggtgagagatgtggacgaagatctgaaaattgtattgaccagtgagctggaggctgatgaagaggcttccgcacaacgtatttctgcgcaacttcccaacattgcaaagctgatcaattccaaaagcagcatcaaggttggtgtaactctggacgaagctggtattcagtctcaaactcagcggattactcagcaaatcgccagagcaacaaaatcccaaagcgttggtgtttctttgagcttggatcaaagctctgtcaacaagattaagactgagcttaataatttgaaggtcagccccgacatctctcgtgccatgactgatcaactggatcaaatgggtatccagattgaccgaatcactggccgctgggaagcggtgaacggcgaagaggaacgtatgctgaatctgaccattcagggtacggatcagatgcagagaaccgtcacgtatctgcaaacctataatgcggagactggcgaaatcaatacccatttgaccaatgtgactgcaaatctggagcgtcagcgcagagagcaggagcaggtagcggctcaggccaagaaggacaatgaatcaagggtttcatacttgaatcgccaaaaggctcttttggctgatattcaagccgcttatgtcggtcaaacttctgtaaagccgattacggatagcgctcatttgacagcgctgaatgatacttacgccgcagtcaatgcccggattgagaccatgattgccgccgaagggcggctggataatgttcaacgctctaatctggaagctcagatttccggcttgcagcgtttggtcaaagagtaccagaacgccgagtatgtagcaaccaagctgagaacaaaggacatcggttctatcaaggcagatcagctttccgggctggaagccttggagaaacgactggaatctgccggaacactgaccgacacgttcaagagtaagatcgacggattgaagaaaactttgcaaggcgtcggcaccaaagatcagttggtagctttcctcaacagttttgaccagctgaacaatgatgtggctgtcttccaggagcggctgcgtggtgcgaacaagatctatactcagttgatctctctggacaagcagattacctctgttcagtcttctatgacaaagctgaataccagcgacgacaaaaacaagttgctggctttgcaaggtcaactgtctgtgctgaataatcagcgggcggctctggaggcacagctggttccctatgctgatattattcaatatgcgaagcaggcgacggctcttgaacagagccgtcttttgaatggtacccaactggtttatacccagatggagctggctgacaaagcgcgagattacgatgtcgcaatgcagagtatcccgtctaccattgctgatttgcaaacgaagtttagccaggtggtggcccccacagaaaatctcgtgcagaatatgagactgctccgggagacagcggcacagtatggcgctgatatgggggatagggagaaggttgcgacatatgagcggctgcaatctctgattggtgcttgcagtaaggaaatgtctgaacttctccgcgtccagcgtggtgatgtcaacgacttcaagtttactcaaaacttggagaaagcaaaagctgatttggaaacggttggaagaacatggagtgcattgaaacaagatcctggtcttaatgcgcaattccaacagctgcgtgaaaacctcaagcgcattgacaatcagatggatctgagaaaatggacggcgcaatttagcacgttcaaatctgaggtcaaagctgctggaaagaatatgcagtctttgggcgacattttgaagaacaacgtaggtaaggtactccagtgggtatctgctactacgcttctcttccgtgcgttccggctgctgagatctgcacttactacaatcgttgatctggatacggccatgattgacctgcaaaaagtcacgaccgcgaccagagaggagtatgaccgtttctatcatagtgccaatggcacagccaaagcgctgggtgtaaccactgaggaagttatttctcagacggcggaatgggcacgactgggctatgctatgcaagatgccgcaaagctggcagaaaactctgctatctttgaagctatttctcccgacatggatattacccaggcgacagacggcttggtaagtatcatcaaggcttacgacctcgatgttgaagactctttggatggtattatctccaaggtcaacgaagtgggtaataagttcgccgtgtccaacggtgatattgtggaggctatgacccgtagctctgctgctatggctgctgcaaacaatacatttgaggaaacggtagctctggcgaccgccgctatcgaaatcacaagagacgcggcgtcggttggtaacggtctgaaaaccttgtcaatgcgtatccgtggctatgatgaggagacggaggaatactccgcagacgtgtccgaattgaccggtacgattgccgatctcactaaggtcgcaagcaataataaccggggtatcagtttgtttgaggcggacgatcccgagacttatcgttctacctatgacattctgtccgatattgcggatatctgggatgagctgaccgataagaatagagctaaccttttggaggctctgttcggtaaacggcaggctcagattggtgccgcgattttgtccaactttgatcaggcgcgtagtgccatcgtaaagatggaagagagcgccggcagcgcaggacgcgagatggacaagattacgcaatcgttggattataagctgaatgcactgaaagaaacatgggttggtgtggctcagaacctgttccagaccgacgatatgaagctcgttgttgatgctttgaaccttgtttccaacgggattgaccagctgacggagaagctgggattgtttggtacaatcggtcttgttggtgcgattgcgttgatttataaattccgtgccgaaatgaatatgctccagagcactgtccttccggtgacagaggctatcagagcgtctggcgtggttatggacggtagcgccacaagtgtacagtattatgctactaagctgatgggacttgataagtctcagcgtgcggcagcaatgagcgcacttggactgactgcggagcagaagaagcaggtcatgacaatgaccagtctgattgcttctgcacagagatatacgatccaagagttggcggaaagggctgctacggataaaacgactgctgctacgcttgccaagaatatggcgaaagctaccgagaagcggacgaccgagcagattaccgccgcaatgatgaccgagatcctaaactccaagaaactgacggctgctcagaaggaagcaatcgttgctgctctgcaacagaccgcagcgaatgagaagcaggcattttcttggaaggttgttggggccaacgccaaggccgcatttgcggcgatggcgactaaccctatgacatggattaccctggcagttactgctgtcatggctttggctcaggtatggcaaagcgtaaagcaacgggcagaagaagctcgtcagtctatgactgaggctgcggaggcggctaatgatcagcgtaattcgcttgccgatctgattgcagagtataaagagctggcaactgccggcgacttcgactcttctgccagagagacggcgaagcgtatccagaaagatattacggatctggttggggcgcaggctgataatcttgatctggttaatggcaagctggatgacgagatcaagaagctcgacaacattaaactgcaagcagcgtatgacgccagagatactttggataccaagtaccgtgacgcaatgtcacgatataaccaaggtatcaacgctgaaggttctggaacgaattttcttggcgttgttactgacgcaggtggcattgaccagattttgcgaaagatcggttatgttaatgatgcgtgggaaaatgtcaacgggcaaatcagtattagctatgcactggcaggaaagaacgcagaagaagtcctggcaatgtacaaagaactccagcacgtacttttgagtgacgatagctggcaaagcatggctgatagctggcttggggactcatcccaagatgtcctcaacaacgttcagcagcagattgagttttatcagggactcgtagacgattataactccgctcaagagaacttcctcaaaaatgaggcggtcattgaccttggagagacgctgaaaactactgatatcaatactcaggatgctttcgacggatatatccaggggatcaaggatagcacggagtattctgaggcatataagaagatccttttggagcttgccaacgataccttcccggagttcagcggagcaatgcaacaggccacaaacaacggtggcacttctgtatatatcgcacagctggaaaaactgaccgatgttatttcggggttgcagtcttcgtatgatgctttggcgtctgccgaaagtgatatggccggtggcggcggattgtctgctgaaacaattgagtctcttgccggtgctgaggaaaaatatctggactacctctacgaggagaacggcgtcgtaaagctcaacacagcggcatggaaagaaaacgctaatgctaaaatgcagggcgagatggacgagatccaaaaggagatcgactcgcttcaagagcgtaacgccaccctgcaagagagcattaagtattacgaggagcagcgtaaccttggcaatgatggtggtctgtggtcgggcatgatcggcaacgccacagaggaaatcaagaaaaacaacgaggcgattgctgaaaaccagggcaagttggcgatctacagcagtttgtacggttcaatcaccggtgatctggacgcatatacttctgccttgcaaaacttctcgaatgttgcaactaccattgatactatctctgattctttccggacgcttgcagatttgcaggctggggtagccaacgggtttaccatgtcattggataaggctttggagttcgccaaggtctatcctgagatcatgaataatgcccaagtagcggctgatggtcagattatccttaatgagggtgtagtaaactctttcattcaaggcaaaagggctgaattggatgctcagattgatgggcaaattgcccagctggaagctgaaaaggcagtcttgcaggccaagatggaagcagctcagacgcagcttgaccttgccaaagcggttgctgagggtgagggagatatctcaaaagagctggcggagtatcggatcaatgccggtaacgctgttgctcaggctctgattgatgctggcgttgatgaggcgactgcgtttaagctggcggcggctgctatggctcaaaatgcggaagagttcaaccgggtagcggctgaggtctgcacggatgtaaatggcaactttaatcaagctgcctatgatctggcgcagacgatgtacaacaacctgaccagcgtaaagacggatcttgcttctgtcgcaaagcaggcacaccagacagctaaggctattgctggtgttgcaagcggtacagtagctggatcggctgacgtacaaggtgggtctggtggtggtactggcggtagtggcattaagctcaacctgacaagcggtagctttaaggggacagaatattcctacaccgctaaggaaagcaatctggaggactttatttcccagattgaactggatgtttccaagtaccaagacacgatcagccagattgatggacaaatcgcggctttgcaggcgttgaaaaatgcgcctttgaagagtttcaagagcgatacgaagtcgggtagcagctctaagaaagatgtcgaagagtatgtcgctaccattgacgactatcgagaggcggttgaacggctgcgcaagacacaagaggccagagcggagcttgaaaccaaaattgataactctgacgatttgagagagaaaatccttttggagcgtcagctgatcggtgcctatcagcgtgagcaagaggcgctgcaaaatctaaatgaccaaagggaaagcacgatctcttccggcgttaaggcgctgcgagatctggggttcgaggtacagtataacgccgataccaatgaactttggatcgcaaacatggagcacctgaatgagctggtggccgatagtaagggtggatacgacactctgcaggaggccacaaatggtttgaggaaggaaactgaggatcttatcaattctctgacggacttgaacgaggaaaatcgtgacggttcggaaagttggaaagaacttggacaggatatcaaggaagcccgtaagcagattatggagcttctggatggtatcgttgaagaggcttccgacgcggttgatactatccaaaatgtttatgacacactccatgacgcggcggacgagtatgcccagagcgggttcattaccgtagatactttgcagagtattatcgggcttgggcagaagtacgtagcgtacctgattgatgagaatgggcagcttgtcatcaacgaagagcgcatccaagcggttattgccgcacggacgcagcagatggcgattgagagttctttggcctatgtagaagcgcttcgtatggcaaagtctgagggcgatatcgcaactctgaataatttgctgtatgcaaccgaacaggctactaacgcaacttggggattggtctatgcaaatctggctttggctggactggacgaagatcagtaccaagcggcgttgcggaatatcaatgcaattcggactatggcggacagcgccgtacagagcattggtaaaaccgtgggtggcgtgacggacgagttagaggagatgcagaacggattgaacgacatcctcgattatgtaatggatatgctgaaacagcgtatccaagatcagatcgacggattggaggacatgaaggatgcgtactctgaaattatcgacctgaagaagcagtcattggaggccagcaaagacgaggcagatcaccagaagaccatggcatctaaaatgcgtgagattgcgaagctgcaagctcgtattgatatgctttctctggatgacagccgcgaagctcaggctgaaaaagctgcgttgctcaaagaactgagtgagcttcagtctgatttggccgacgaacaggcggacagaacactggaggctcaggaggacgctctggataagatggaagagtcctatcatgacgagaaggataaggaaattgggattctggaagacagtatctcttctcatcagaagctctatgatatggcaatctcttatatcgagtctcactgggatacgctgtatagcgagctgatcagttggaacacgcagtatggtgatgtgctgaacagtgatattgcgaatgcttgggataactgcttggctgctgcacaacggtatggaagttacgtgtctgctctgggaagtatcggaggagacatcaaggccacgcagtccagcggaacaaatttccaagttgggaatgctacctatgacaatagctccagcggcgaagatatgatccatgcgatcatcaaagaaatgtatgcaaacagcaagcagcacgcttatgaagatgctgccggcaagctctatctgaaccggcgcaatcttgagcttggcgcacagctggcacagtatggtattactgcggtgcgcggcagtgatggtgtttggtacgtagatcgcgtgggtgggcaactgctgtacgataagtacagaaagtacacctatcatgagggtggcattgtcggcggaggagatatcaagtccaacgaacaactctctctgctgaaaaccaaggagtgggtattgagcgaacagatggtggacaatctgaccacacagatggatcgtatcaatatgctctctgacgcaatgagtgatctgccggattatgctggcaagtctactttgtctgatgtgatgaagcaggtaggcggcagtaagacggtaaataatatcaccaacaacagcagacccattgaagtgcagattggcgatacgatcattcatggtgccgaccaatctacggttgataagcatatcaaggttacacgcgatatggtcaatcagattggacggctcattggaatcgggagataagattgggacgcccgaaattgggcgtccctttcatatagcaaggaagggaagacaatgttcaaaagctatgaatttacctatgctggtatgcccgcttccatgtttggtatgtacattgcggatatgtccagcaataaacatagtgccaatagttttggcaataaagcaaatctggtggagacgcggctggcaaatcgtgttgcgccgatccactatggtgtgcgatataacgatagtccgttgagctttacgttgattttcggagcagatcataagttggatcgctatgaaatgcaggcggtttcaaaatggctgacagggtatcaggagtaccaatggctcagtattgatcagccggatatggagcatattcaattccggtgtctcgttcaggaactgacgcctattcatctcagctgggtgcctatggcgtttgaagctaaaatcatctgcgactgcccatatggatatagttatccatttgcgaagacctatcaaatcagcgggggaacagcggtgcggttttacaacgacagtacctgcatggaaaagttacgcccagaaatgttggtcactcttgctgccggctgtaccagttttgcagtaaagaacaagacgaccggagcagaaatgcggtttgataatttgccgggaagcagtttgtctatccgcgttgacaatgagaaccaggtagttaccgaggaagtttctggctacgatctttatgaacacttcaattttgcgtttttggagttggaacccggagacaatgaattggtattcactggaactgggagcgtaacgatcagcggtcgatacctttataacgtcggagcataagaaaggaggccagaggtgtatctggattattctaaattggaagccagccagattaagcagcccgctttacggttgcagactctggccggtaaagagcttggggttatcccttgggtcagcaaccttaattttgaattgaactatgcggatgtaagccgcgttgagttcgatgttcctcggcattccgatgggaaaatcaatccggtttatcatttgctgaccagctacaaaatgctgtttaccgaacagcttggtatctacattcttcagaggccggctacatcaggtgacggtgtatctgaggtaaagcatattaccggatactctattgagcagctttttgagaaaaagaaactctatttggaagaaggaacgtataacttctggaatcctgttcagccggaggatactattctgggccgtattctggaattggatacgacatggagtattgggtatgttgaccccaagctgattggatgttatcgcacctttgacgagtacgatagcgacgccttgagtttttgctatggcagtgctatggagaagtataactgcacgattgtgtttgacgtgtacgccaggacaattagtgcttacgacgcgggcaaaagccgtggaaccgtacctatctatctgagttatcagaatttggtggacgcggttgatctggaagagcttaccgatgatatggtgacaaagctccatctgtacggatcggacgacctgagtattcgggatgtaaacccgatcggcacagactacatggtaaacctgtcatacttcatttccaacggcgattttgatgtgatcgccgagggcagcacagttactttggccgagcgtgtcaagagctggaatgctgcaattaaaagcaaccaaacttactacaccaatctggtagcagcacgggcatccagaaccgcccaaaggctggcggaggaagcgacactcgcttcgctgaaaggcgatttggaagtcctgactacgcaacaaagtgtaattatccaggcaatggctctggaatccactgccgctggaaagacaagtcaacagcaacagctgacagagatcaatgagaaaatctctgcaaagaactctgagattgaggcgcaagaaacagtgattgcgaatttgcaggcagagattgatcggtataccactgatattcagggtgttgtagagcagctgtctatttccaagtatttcacaaaagccgaacaaaaaatcctcaaccactatttgattgagggcgaagcggcagaagaaactttcgttgcgaccgatgtagatacatcggcttctggtgccatctccacattgcagggggaggttacattgaccggggctgatattgcacaggcaagtcttaacggtaaaagtatgtatgctattgcgggcggcgttttgaaaattgccagcgcaaagctgacggcagacattgtgcgtggtactttggaggttaacccaagtacaaacgaatatgtactgacggtgtacatgggatctacgacgtttgatgagcatagcttcccgagcggacttgttactgcatccggcatactttctcagttcagcagtgatatttctcctgtttctcaggatggggtaacggagaacaaaggcacccagatttcttttgaggcgggcacatccaagctgtttttcacagtaaatgtgaacgagtatcaaaaatattctgtggcgcaagagctgtacgcatttggcgaagagcttttggatgaatgggtatggcctgtttacgagttttccattgatacggctaatttcttgttccagaaagaatttgagccgtttaagaataaattggagttcggcaagagcatttatctgaacgtcggtgatggtggtgtgatcgagccgaagctgatcggggtagctctggactttgagaaccccgagaagttgacattgaccttttctaatcgtttccaaaaacgtgacgtagttgcgaattggctgagtgaggtcaataaggtcagtgcgtccagccgcagttttgataccagcaaatacctctacaacagaactgcgaataagactactcaggtttcgcagtttatggagaacgccttgaatgcggcagtaaacaccattattggcgcaagtaatcagagcgttgtgatcaatggtgcgggtatccaagtaggcggtgacagtaagtatcaactgcgtatcgtggacaacatgattgccatgactgacgatggttggaagactgctaaactgggtatcggtcggttttactccgatgcgaaaacaggtctcaaagatgataagggtaacgatatcctgattggagagacatggggtatcaatacagaactgcttgcgggtagtctcattattggtaacaacctcgtcttggagaacgccaacgataacggcgtaatgcaattcaaggtggacgccaccggagcttggttgtataacgcctcgtacattatgcagcatgacgacggtggcctgatgatcttcgatccgaagtatggtatcgtggccggcaataagctcctgttcaatactaacggtacaaccgtgaccccggagtttattgacgattggggcgatatcaagttcgatgcggacggtatgcctgagaacgcaaacttctatctggatcttcgagacggcagcgcttatttcagaggaagaatcaaggccgactccggttcgattggcgggtgggaactggccgagaatgagcttcattgtggatcaaactctacttttgttgccctcaactcttccaaggataccaattcgctgtatgcgatttgggcgggtgctacaaaacctgagaatgcaaaattctgggtaaagcgagacggcacactgcacgcaagagatggcgagtttagcggtacgctctctgcctcaagactgagcggaaatctgacagccgatccacaatctggtggatggctgaaaggctgcggtattgatgtaaacaacggtgcgttctatgtcgatccgtccggcaatgtcactatgaagggcagcatcaatatggcggacggcagcattacttggggcagcggcaacagcccgtgcttggtgttgtattgcagtattgccgcctcacctcctaccgggtcatacaactcgtatccgtccaggggaagtaccagttggcacaagtctatcaatgacggagatctctatgcttcttatacctacgatggcggagtgacctggacttcggcgattaagattcgcggtgaagacggccagaatggtaaagacggccaggatggtatggacggaagcgatgcgaccgtcaatgagcgaaacgtttttaatgttttgacaaatggcggtacaaagtttggcgtttttagtgattcttcgacgcgcaagctgtatatcaatgcaaactatattcgtgcaggtcagattgacgccgatttgatcactcttggcagtgattatggtggattctgttgcgcgaggggcagcgacggcgtgagttttacttacggcgctaaaatgtacggaagtgatgatgaatactactttattgcgaccaacaaaggtgtgcgtatgcaggcaccggatcatggttttaccattacaaacaatggtttgtttgctgatgaagagatctcggtcggatctgataggagattgaagcaagcgatcgagtacagaatggacaagtacgagaatttctttatgaagctgaaacctgctcagtatcagctaaaagctggaaagtctaagagacttcatactggatttatcgcgcaggacgttgagcgtgcattgttggaaagtggtttgacgacgaatgactttgccggcctgacaattactcctgtccaagaagtcaatcccaaagacggtattgatgacgttttctatcgtctgcggtatggggagtttatctctttgaatacctacatgattcaaacgctttaccgtcgcatctccgaactggaagaaaaaatcaagtctttgtaaggaggactatatgaaggatcaagttatgcagcaactgggattcgtgctgaatgcgctgaacaatgtctatgtaaaaggcaaggcgaatttggcaaatctgagtggtagtatcgccattctcgaagaggttgccgacgttttgaacaatgcggaaattgttgaagctacttcaaaatccgctgaaaaataatatttgaaagggcggtgataggtatgaattgtgattacagcccttactcacttcctaccatcgactttgtgggaggatcaacgcaggaacttgtgttccacacgttcttttcacaaaacaaaaagccgtttgatctatcctcctgtacggccagttttgcgttgatcaattttgtcaacaaaaacggatcaccgcttattgccaaaccgatggaggttagtaagagtgaggacggcgacggaactgtaacaaatgttctgcgtgtggtgttgctgccagaggaaacggtagatctggtcggtaagtttatctatcagattactattcaggatatctcaggggaaattgagatcccggatcagggtattattcgcattgcgaacaatatcaacaaaagtttcccccattaagcaacaaagaaaatcattgagaaaggatgaggacgatgaatacgacctattttctgaatttggtgtcaggcaacgtgtttggctccaagaaaaccccggctttgcctgagaaatattatctgggtctgagtagcgccgcgcctgctctggatggcagtggcgttgttgagcctggtgagggcgccggctatgctcgtgtagagctgacttctttgagcgcccctgttaatggtgtcgtgaccaacaatgctgcgattgattttgcggagagcacttccgagtggggcactatgacccactttgttgtttacgatgctctgactggtggcaacctgctgatgtacggtgagctgtctgtaagtcgtcgtgttgaggctgcaaccatcatgaccatcaagctgggttctctgaacctgtctgtggtgaacccgacggcataaggagcgataggagatgaaggagtacgatattttcctgaaacagcgtttgactgaaggttcaatcatcgtttactccctcccatttcgtgatggcgtatcagctgtaaacagagtagttttgcgggcgatgctgtcatatttcagcctgcaaaagaaaattgcagtggcaaatcaatctgctctgttgtcggagatcgacgagatgctggctacggtcagtgagaaaatcggtgatcaagtttgtctggaagcgagcgccgcacttactatcaagtatcgaaacgaactggagcaggcagcgatgaggctggatatcccagctttcacgctgtttgcccagagtttctttgccttggaaagtcaaatcggtatcaaagttagccagccgattgcttatgctaagagttcccttggcgatgcgcagagtgcaatggcgattgtagcaaaaagtcttgcggaacaaaagcaagtctttgacactattcaaaatcagactgtttttggtgcaaatgatcttgcatttcggaaacacgattttgagtcaggcagtagtgcgatcggtattgaccagacaagcccggagctgctttatcgctatacaacaggaatggaggccgcatttgcgattgcggcaagcattggagaaacagagttccactattctctggggggcggtagcaatgcaatcggtattgagacttccgaaccagaaaccattgcagaaaagaaactgcaaattggtaatgctatcgaaatgttctacgaactggttgtcgagacgatcagcttgtttgctgtgtcaaatgatgcagagatcctaatgacactgaatgcgggcatgaagcgctaccgcctgttgtcagatctggacgataaaaccttggcagagatcgacgatatgactctggaagagttggactttgttgtacttgcttaggaaaggagtaagaaaaatgtcacaggcacatttgggttgttttagcgggactgtgacgccgaatgtcaatatgctggatatcttcaaacagaatgagcgtgcggataatcccaatagcattttgaacttcggtcaaatgtcgctgcggaagctcagtatgatttgcccagaaggaacgaaagtgaaaatcaacgggaaggagatcccactgatcactggtatttttgagctgggcatggatcagattaacattacgtctctggaattttctgaggcggttaatgtcaatatttactatatgttctgagaggaggcacaattatggctgatttgagctggatttctgccttgactaatcagggcggaggcggcggttcttctggcggtgtttctgactatgaccagttgaaaaaccgccctgtaacaaacattgcaggaaccggaactgtaatcagtgctttggagaccggtgtttacaatatcgaaggtacgtggaaacttacacccgatgatattgagcgtgaaacattggctgatgacctgttctatgtaatgaacaatggcgcggaaagcaaactgacatggatcagtgctggtcagattaaaacctatggcgtccccgttggcggtactgctgctgatattacagaaggatctattgctactactgaggaagtagtacgcaatatggtaggagtattctgatttcgtgccagtcgcaaaagctgcaaagaaaatcaatttcatgcaaacgggcaacaatctggatgcagagatgttttctttacaaatatatcaatccacaatacgtgagaagaaaggatgaaatgctatgactgcaaactacaaactcgtgtaccatggtaacaaggccaacctgcctgccgttcgtgatgctggtagcttctacttgactgacgacacccgtgagctgtatttcggtgacaagaagtacggtgagggcgtccgtctctataccagcgctgagggtaagcctgccactcctgccgagggcgtgatctatgtcaataccgataccggtgttggcgaggtctacaatggctccgcttgggttgttgtgatcaagggttatgctaccgttatcggcgagaacgctgatgacagcactgtgcctacaagcaaggctgtgaaggactacaccgatgcgaaggtcgcagaggttaccggcattgttgatggtctgggcgctctggcaaagaaggacgaggtgagcgagaccgagctggaggctaccctgaaggccaagatcaacggcaaggctgaacagaccgatctggacgccgccaatggcaagctgaccactctgattggtgctgatgccggtaagtctgcccgtaccattgccaatgaggagctggctgcccagctgatccccgagagcgccaaggagtctctgaatactctggccgagatcgccgcttggattcagtctcaccccgatgacgcctctgcgatgaatcaggctatcaccgccctgaagaacctggttggcactctgcccaagggagctgtcagcgacaccgtggttgcctacatcaaggagtatactgacggcgctatcgccgctctgaacatcggtgactatgccaaggctgctgacctgactgctgctattggccgcatcgctgctctggagaaggatacccacacccacgctaacaaggctctgctcgacacctacgatcagaccaacgaggatctgaaggacgctgttgccaagaagcacagccacaccaacaagaccgagctggataagatcgctgagggcgacaaggctaagtgggatgctgcggctgcaaaggctcacgagcacgccaacaagaccgagctggacaagatcgctgagggcgacaaggctaatctggacgctgttgttgcagctctgactgtcggtacgttctgatcagggaatccggtaaactgaccgaggagggagtggcttagatgccgcccctcctttttcaattaaaggaggtgtacaaattgtccctattcaacgtaaaccagacggttgccagtaaagcgcggaatacatctacggttccgatcaaggacaagcaattccttatcgtaactgattcaggtgacatcttttacgattctgacggaacacgtgttcagttgacggatatcatcgtcctggacacagagtcacaacgtcttgcgctgacctcaccgttcgagaagttctacttcgtgaagggatctggcgctctttggagatataacaacagctcatgggtcaaatgttccggtggtggaagtatgtcggttgacaaggtgctgtctgttgcgtcttggtcagacaataaacaaaatattgagatttctggactgacggcagatcaaaacggcatcgtgggcttgtctcagagtgtgtccatggaggaaagagaggcggcagaaaccgccagcctttatgtttgtgggcagcaggacggttcctttactgtcgccattggtggagacaaacctacgtgtgatatcccgatcacggttattctgttcggttaaggagggatgagctgtgagccaaacaacgacgaactatgggcttatcctggaagacgattcttcgacaaaatttaaggactggcgtgaagcaatcaacggtgcatctaattccaacttcattaaggttgatgagattttggcggagaaaggcggcaagagcgtgagtattgaatgtacgctgatcgccagctcatgggtaggggtagatgctccgtttacgcaagaactggccgtcactaatcttggtgctgcgcaaaacggtaatatctcggtcgctcatagcgcaacttttgagcaacgtgagatggcacgagatgccaaactctgcgtaaccgggcagtctgatggaaagctcattatctcagcagacggtgaaatgcccgatattgatatccctgtggtaatcactctcctgggataaaagaaaaggaggattcaatatgcctattcttggcaatttcccctctggtggtggaggcggaacaggcggtctgaccctggccgctgtgacagatattcagaccttggccgctgccggcaaggtttatgtgaagtggactgaccctgacgatctggttgtggccggctccacactggcagcatggggcggcactctgctggtgcgtaaggcaggtagtgcccctgtaagccgtcgtgatggtacggtagttttggatagcaagactcgcaatgcgtatcagaacgaatacttttgcgattctggcctgacagacggtgtaacctactactacaagttctttccctacactacgcagagttcctatacggatagtgcggacgacgagttcagcaagacgcccgctcctgtggcagttggcgatgtgtccagcatgagtgctgttgccgctggtaacggcaagctggcactgaaatggactgatccttcggctaccgtgatgaacgacggtgtaacgctggcgacttgggcgaagactactgtggtagttaaggcgggcggttatgctactgatcccgacgacgcagatgcggcgtatcggctggcggtaacgacccgcaatcagtatgccagtagcccgttgactgttaccggcctgcaaaacggagtgacctattatgtgtcgttcttcccgacttctacagatggagcggtaaacacgggcactgccaatcgtgtcactggcgtacctaatcggcttgcgatctctacggttcccagtcagagtggtagcctgacatattcgggcaattctcaaagcccgtcatggagcaactatgatagctccaaaatgacattgggtggagttacaagcggcattaacgctggaagctataacgccacctttactcccaaagacgattattgctggtctgacggtagcacatctgctaagacggtaagctggactatcggtaaagcggcaggctctttgagcctgagcgcgacgagcgtagttctgaatagttcagcaaaaagcaaaacagtcatcgttacccgtgccggcgacggcgcaatttccgcacaaaccagtgacgccagtgttgctacggcttctgtcagcgggaacgtggtgactatccaaagcgtgaacgataagactggtacggcgaaaatcactatcagtgtagccgctggtgcaaaccatactgcccctggcagtaagacggtcgcggtgtctgcggagttccttcctgctgtcggaactgcattgaacgactgctcttgggaagatatcagcaagatcgctgcagctggtttggcaagcacatactggtcagtcggcgcaacaaagaccattaccatcaacggtacagttggaacgctttctctttccaacctgtctgttgatgtttttattttgggctttgaccacaacagctctgtcgagggcagcaacaggattcacttccagattggtaagatcagtagtaggttgattggcctgatcgacagtggctacaatagctattataccaatggtacaaagtatttcaatatgaaccattggggcaactataactatggtggctgggctggttgtgacctgcgttacgatgttttgggtagtaccgatgtggctccttctggctacggttctgctgtaactacatccagagttggttataatgcaagtgccacttgtgctacaagccctgttgcgaatacgctgatggctgcgcttcctgctgacctgagagcggttatgaagggcgttaccaaatacgctgatgccgttggcaacagctccaatgtggttgcgaatgtcaaggcattcaccgactatctgttcctgctggctgagttcgaggtacagggtactcgttattatgctaaccagtatgagcagaactaccagaagcagtacgcctattactcttccggtaacagcagggtcatgtatagacacaacgctatcggctctacggcgtggtggtggctccgctctgcttattacaacaactataactttttctgctatgtgtacactgatggcagcgccaactataactttgcaaggtatgcggctgcgctcgcgcccggctttgctgtctaatcctccgcagagtatcccaatccatatcccgcccatgaaaatgggcgggttccccgataggacagataaggtaacagatacggagacaaaaaaacaaaagcggaggcggcgctttgcgccgccgacgcgatttttagaaaaatgccctataaaatgctatcacttaacagtctaaatactgcatacaaaagctgaaaatagcactaaaatatttatgtgcaggtaagtgggaggttgagtatggcatcaaacaaacgtgttttcacgctgcgtctatctgatgaggtgtttgataagattggtgcgctggcgacaaaacagcatcgttccatgacaaactacatagagtttgtgcttttgaaacatctggaagaagtcgaaaaagcggagggagcgattactgctaatcaaactaagttagatgaatagggcaaaagaccattcaccagagaggtaaaagaatgtctgtattgaaagcaaggcggactacgagtaaggctgagtatgtcaatactgctaaccaaatctatgtagaaacgctgaattttctcacaaggatgtctgcacggtattccagacttttggccgaacctgtggctaagttggctggagaagtagtggatcatgctgagaaagcgaacagtattttcccatcagacgctcagagaattgagttacgcaaagcgcatttactggaagcaagagcttccttaaaagcactggatgtcagacttacgcattgctatctcgtgataatgaagaatcccgagggatgttttacaacttctaagggaaattcagtatctccgaaggaggcaacggaaaagttagacagaatggctgcaagtcttggggaaatgattgataacgaagatgagttgatcaaagggactctgaaatcgttagggcaaatcaaaaagagctaaatctttattgggtgtatttctgaaaacgtgtccttggtgttttcgccgcctttggcggcgtggtggtggctccgctctgctaattacaacaacaataacaatttctgcaatgtgaacactgatggcagcgccaacaataacaatgcaaggaatgcggctgcgctcgcgcccggattttgcgatgcggggtcacatggagtaaccgataggtgaaagacgaccctcgcaaaaggagagatacttccctgggtgaaaatccctaaaactgccctttgacgaccttacacggacgctgcttgcatggcggggtacttgcgctatcctcgtttcatgtgtcgggtcaaagtagtttagatgcgcacctacaagacaactatgcggagggcgaacactttttatgacaagcgaagaacgccgagaggcaagatatcatcgcagaaaatcaaagcgacaagcaaacagactaaaacgaagcaaagaagtcggtacacttcaagatgttttcaactatcacgatatgttcttctatggaagaaaatgttgtacgggtgtccgttggaaacagagtacgcaaaactttgagcttcacttattttctggaacagccaagagacggcgtgaagttttggacggtaagtggaaacaaaagaagtgcgcacatttcaccatttctgagcgtggaaaagtgcgaccgattgatgccccgcacatcgacgatcggcagattcataaggtttttacaaatgaagtcctcattcccctttatcatccgggtatgatttgcgacaacggagcaagtcagagaggtaagggactacattggcatttccgtagggtaacacaacagcttgcatggcattaccgacgctatggaagagaagggggcatattccttcttgacttgaagagcttctttccgaatgctaacagagacatcatctatcgtcggcatcagcaagtaatgtttgacccgcagattcgggcagtagcagacgcgattattgactatgcgccttatggcaatgcgcctggtagaggtatgcctttgggcgtggagccgagccagcaggagatggtgtctcttccaagtgcgattgacaactatatcaaatgccagcttggtcttcactgcgccggtcactacatggatgactactatgttatttaccatgatattgaagaactgaaacagatagcaagagatattgttaaaaagtttgagtctttcggtattagggtgaataagaaaaagtgcaaaatcattccgcttacaaagccgtttaggttttgtaaggctcgtttcacattgacggaaaccggagcaatcaaaatcaacggtagccgtgatggtgtgaagcgtgcaaggcgtaagttgaaaatgttccatagggaatatcttgccggtaggaaaacacttttcgagatagatcaatatatggaatgccagactgcgtactacaggaattttgacgatcacggcaggttgttacggttgagacggctgcactatgccatgtttagtcggtatagagagcaagaacaactaaagaagcccgcgtaaaaataactaacagattacactcgaagcaagtcttcgggtgttttcttatttggaggtatatcacggtgaaccacaatagctatatcacagtaaaaagagcaaagttcaagactattagcggcgaagtaaatatcccatacggcacgaagctggaagtaggtggaaatgttttgctgcacaacgggaaaccggtatgtgccgtgttcagtgattgcgcatatgagttctttgcgcaaaacgacgatggacaagggcttctgcgtggaaaactcattcaaaccatcaagtctacgcttgcaaagcatgatgaggcacatcaggatagatgggataagatttgggatgatccccgctgccagcagtacaagtgcagtgatcgtgatgatttctggctttggaatcacgatttctataatgctgaaatcgaagatctgaaacatatcgccaagttgattggtgcaaaggaggtcaagtaatgtatcggattatcaaaattgacgggacagaattgggcattactgattctgtcaactacattcgttatggcgataacggatgttttactccggccacccgtgaagatgctatcggtgtggcattcaagagtgtggcctacaatctggttgggcacgaagacattgagggtgccggtactgtcgttgtctcagagattgacggtgggcaagaactcaaaagccatcagactaccatcgagggtctgattcggacgattttggagggctgagaaatgaaggacaaactgagagaaatgtatgaaaatggcctgcgtggaatcgaaccctccatttcagcgggtggccttttgaaggccgttgcgaatggttggattacgaccgaagacgcggtggaaatcctcggcagtgacaatgccttggaaactgtacgtgcagcgaaactcttggaaatttccaaggcttgcaacgcggtcatcgtagccggcgtagacgtacctatcggggatcgccgtgaccacttcaatctgaaactggaggatcagagcaatatcaacaacctgttccgtgtggttgagctgggtggtactgagtacccctatcaggccgatgatggaacctgcacggtgtattctgctacggaaatcgctcagatttacgtagcggctcagacgctgattaccagtcagacggcatatcacaatgctctcaagagctatgtcaatgccatgactgacgctgaggagatcgctgctgtgcagtatggtatggatctgcccgaaccctatgctgcggctttgtctgagaagatggcagtagcccaggctcagatggaagctatcatgcaaaagctgggcggtgccgcatgagcagcgttgagctgattgcggaactaaccgacatctgcattcgtcaggctgagatcattaaggcacaagcctttatgttggcacagtttggcgctgaggtcaaagaggaagaggcgctgcgggaacaaaaccggctgaaagaaattgccggagaatgggagtaagataagcatggagcgaaaacgaattgggaagtgggtgctttctgttctgctctggttttggactggcggtgtgtatttcttcggcgaggtcatctggaagacttctcagggtaggccagaaacgatcagctggacgatgtttacgttggcgattattctggccgtccccctggaacgcttcggagcagagcttccctggggaatgccgctggtagggcaggcgtgtatctgtgctgccgcgattacagcgttagagttcgttaccggacttgttttgaatgtgtggcttggtttgggagtgtgggattactcgcacttggccgggaacatcctgggacaaatctgcccgcagtttactttgctgtggctcgtcctatccgttgtgggtattgtcatactggactggatgaggtatgcggtagagggtggagagaagccccgctacacataacagaataaaacagctatttgctaaccatttttaagagccgtacctaaaaaaggtgcggctctttcttcatacgaaaaaggaggtgagagttatgggacggaagacgagacaaaacaagatcaccagcccggaattgatcgcccagatcaacccgaagaacattcggctgatgaacgattttctggaatacctgcggagtatcggcaaggcggattccaccgttaaggcatatacgagcgatttgtatattttcttcgtgtgggtactccaaaatgcggacaacaagtatttcccggagattagcaagcgtgacatcatctcgtaccaaaactggctgttgcggaacaacgagaactctcccgcccgtgtgcgccggctgaagagtacgttgtcatctttgagcaactacatcgaagcaatcttggatgacgagcttcccaacttccggtcaatcgtccgcaagatcgagaacccggtaaatgagccgaccagagagaagacggtgctgaccgacgaacaggccgatcaactcttggactatctgatggagcgcgggcaatacgagaaagcctgctgcttcgctttggcgcggtattctggacggcgcaagtctgagctgacgcggttcaaagtgtcgtacttcgacgacgagaacatcatctatggcacgttttacaaaacgcctgagaaagtcagaacgaagggcaagggtgtcaatggaaaaatgcttacctgctatgtgctggcaaagcctttcaagccctacttcgatgcgtggatggcgaagcgggcagatctgggtatcgaaagtgagtggctgttccctgacagggacgatcctacgaagacggtgcctatctctacgctgaacagctgggcggagaccttctccaatattctgggtatccctgtgtattggcatagtctccggcacttctttacgacttcacttgccaaggcaaacctgcccgattctgtgatcaagaccatcattggatgggagagcttggaaatggtggatatctacaaggatatcgacgatgaggacgaaatcggcaagtattgcatgaacggtgaaatcgtcgggcagaagcaagccacgctttctgatctgtaaggaggtgcgagatgaacgaactgacaattcatgactaccttcaaaagaagggattgagtgagtatgggatcgctgggttgatgggcaacttgtttgccgaaagcggccttaatcctcgaaatttgcagaacagttatgaaaacgttcttggcatgaatgacaatgcttatgtagctgctgtggataacggtacctacacaaatttcgtgcaggacaaggctggctttggccttgctcagtggacgttttggactcggaagcaagccctgctggattttgctaaggcgtctggaaaatctatcggcgatctcattatgcagctggattttctttgggaagagctgtccgggagctaccccggcgtgctggcggtgctgcgggcggcaacctctgtattggaggcttccaatgccgtgctgctgaactttgagaagccggcaaaccagagtaaggatgttcagaagaagcgtgctgagtatgggcagcggtactatgaccagtttgcctcacagactgctcctgcgtccgactctgatttggaacagttcagaaaactctttcaggaaatgagagctgaactgcaggacaacgactgcggccagtggagcgctgaggcgcggcagtgggcgttggatatgggtttgattaccggcaacgggactgtcatcaatggtgaacccaactatatgtggcaagaccttgttacccgtgaacagttcgtgacggtgctctaccgtcttgctcaaatcatggggtcgccggcatgaaaagtatctacggttagtaacgaaaatatctgaccgttcggaaataaagaggtgaacttcaatggtcgatatcaacaacattgtatcccgtggtgggtacctggtggatggcgtgacaggagagaaagtcctgttctatgagtgcgatcccagaaaaaacacggaatgtaatcgtgaaatgtgtcggggtggcggggcagaggatgagggtggcttcgggttctgctctaagacactcgatccgcgtttccgtaaagacggcggtaaggcttggtatgctgtgctgaagacatcggaggacggcggcgagccttactggggcagagaatacgtggaggtggtttgaagtgatgacagttcaagaatgtatccagtacgttgaaagccatctggagatccgccctgcgacggataacggagcttataccagcggaagaacgatcaagcctgctggctgcgtaaaccattctgttggctgcgcccaaccttctgtcgatgtgtttttcaacacgatgaacaagtccagtgcgggctggggtgttaatgctctccttggtgacttccataagggcgaaggacgaattattctcgctttgcaatggaatggtcgcccgtggggatgcggttccggcagtaagggttcgtggaataacacgaaggtgcagtgggagatttgcgaacccgcaggccacacctatgctggtggcacgatggtcggatacgacgtggcgaaaaaccagggctatttcgaccggatgtggaaaatggtcgtggcatggaatgtctatatggtcaagaaattcggatatccgatttctgggatcagcgatcatgcagagtcatatcgtgccggctacggctctaaccatggcgacgtggggcagtggtggccgaagcatggcaagagcatggatgctctgcggaaggaagttcaggaaattctcaatggcgaaacggaggatgatgacatggatgtaacacgtttcaaagaactctggggcgaaatgcgtaaggaactccaggacaatgacgcaagcgcatacagcgcagaagcacgcgagtgggcaacgaagaatggtctgatcgccggtaatggtgcgaccgtcaaaggcgagccgaattgtatgtggggcgatattttgacccgcgagcagttcgtcaccgttctttatcgttggactcagatgatgggtaaggcgtaaaatgaccatctcgatcgagcgtggtaagaagaaaagcaagccgaaatcgaagaggccacgccttggatttaccaactggcttgctgtatgtatcatgattttccttgccgctggattggccggcggcttttaccttgctcgactgagtatcgtatatgggtatactggggcgctggcttgctacacggcagcttttgccccgataggaactgcctgcagtattgtgctcagtaaaattgtacacaagagcgaggtagaaaactctggtgctgatggagaaggaattaaattcgcaactgctaaagcacacaatttttgtgaggacggcatagagggcagcaaagaaagccctgcaatataaaaaaggaggatagagtgctatggattctgaatgggtacgactgattgtatcggtgttgtctggtcttgccgcaactatcccgctggcaatccagctggtgaagtatgtgcggaaaacgatccaggacaaaaactggccggaagttgttaagctcgttaccagttacatggaacgcgccgagacgatgttcgagaagggtgcagatcggaaggaatgggtcatggctatggttaaggcttctgccgatactgtaaattatgatctcgatatggacaagatttccgatctgattgacagtctgtgcgatatgagcaagattgtcaacggtacctccaatacggcgcgataagcactttggagggacatgacatgaatatgggagagatcttgggatggagcggcgggacgctccttttgcttatgacctttgttcagattgccccgatcaaggtaaatccttggtcatggttgtcaaagaagattggcagagcaatcaacggtgaggtgttgaatgagatcgccgacatcaaaaaggaacaacgtgagacacatgacaagctcgaaaaacatattcaggacgatgatgagcgagatgcgagtatgcaccgccagcgtattctgcggttcaacattgagcttatgaggggcgaggactttacacatgagtgttttaatgatatgctccttgacatcgacgagtatgagagattctgtgaaacacaccccggatataagaacaaccgagcggtcatggctattgccaacattaagcgagtataccaagaccatgagaaaaacggtgggttccttgtatgaatgaagaggggtacagaaatgtacccctctttttttgctaatagtctctatttgacatgggcggtattggtgtgtataatatataaggtgtacacaaaccacgaaacctatctgaggttttaaggtgttaccacaaattttaccacatttgactatcacaagataaaacaagataaaagcaaaatgggtaaaaaagttttggatttcatgcgaaatgtgagataataaagcatgataaggcaagatagagcataccgtgaattgttcccgacaatgaagccgttggacatgcccaagaaggccgacaaggcggaagccgctcccgccgaagtgaagaaggaggaggtcatcgacttctccaaggtcgagatcgagccgctgttcaaggatttcgtggattttgacaccttcgccaagtccgattaccgggctgtgaaggtcaaggaatgcgaagccgtgaagaagtccaaaaagctcttaaagttcgttttggacgacggaactggcgtagatcgggtcattttgagtggtattcacgagtattatgagccggaagaactggttggaaagacctgcatcgccattacgaacctgccgccccgcccgatgatgggcattgattcctgcggtatgctgatctccgccgtgcatcacgaaaacggcgaagaaaagttgcatttgctgatggtggatcctcacattccggccggcgcaaagctgtattaaaaaaacgaaaaagagttctctcggcagagggagctcttttttgtgccaaaggcacggggaagcagcgccgtaggcgctgcacgggataagggggccattctctcacgagagagaatggccccccttgccccccaagagaacacaaggggctctgccccttgaccccgccattgcgaggtttgggcttgaagagctgctcagcctgaggaatcgggtgtctgctgtttttttgctgcgatacaatttggcttgctcctattatccgctgccgttttgcccatcttgtagaagtacagcctaatttctgtctactttggatttgtacgatcttgctgatgcctgccaaggcggcattgctgcgttcgccgcgctcaagtttgcttcttttttagtcctctgctgtaatatagatttcttcggctttttgttgggcgaagatgagggcggctttaacatcgccgtaattctgtgcttccagttgagtcagtgcgtcggtgatcgcgttgaatagcaggtgatacatcttttcataatcaggcattttcatccctccttgggattataataacctgaaacagattaaaatgcaagttaagaagttgcttgctttatagttttcctggggtgaagatgatgtatccgagattgagagacctgcgggaagacaacgatatgacgcaagctgcacttgcgaagctgctgggcatgtcgcagaccggctattccaaatacgagactggcgaaaacgacgtgccaacacaaattttaattaaactggccgacctctacggaacctccgtcgactacctcctcggccgcaccgacaaacgataaaaacgaccgctcacgcggtcgtttttcttgtaatgcggcgagcgcagcgatgccgccccgcaggcagtctgccgccagtctaccgtcacacgcgcctcacggagtaaggcacggttgctggatgaaccgaatcgcaggggttcatggcgaagccatgtacaccgcacccgattgcgcagcgcgtgcagctcttcaagctgcaatctgccaatgtcggggtcaaggggcagtgccccttgcgttctcttgggggatcaaaagggggcaattctctcacgagagagaatggccccctttttccgcgcccctgcacggtgcagggatagaagcgcgctatcgcgctgccttttatgctgttcagcagaactgcactggctcagtggccgccttgagccactccagctcatccccgctcagatacggcgagatcgccgcaaagaccttagcgtgataagcattcaaaagctccacatcgcgcgacgagagcagcgacagatcgatcgcatcgcggtcatacggcacgagcgtcagcggttcgagcgtaaggaagcggccgtactcgttgacctcagcctcgcgtacaacgacgaggttctcaatgcgcacgccgaacttgccggcaaggtaaatgcccggctcgttcgagaagatcatgccctcttcgatgacgcagtggcgcttctggcgcttcacgtcccagtgtacgcgctcagggccctcatgcacgccgaggacgaagcccacgccgtgacccgtgccgtggttgaagtcgaggcccgcttcccacagcggcgtgcgggccagcatgtcaaggttttcgcccatgcagccgtgcaggaacttggccgcgcccagctgtatgtgtccgcgcaggacaagcgtgtagatgcgcttttcctcgtccgtgagcggccccagcgcgatggtgcgggtgatgtcggtcgtgccctccaaatactgcgcgcccgtgtcggcgaggcagaggccgcgcggctccatgggaatgtcggtctcctcggtcggctcgtagtggacgatcgcgccgtgcgcgccgtaggcgaggatggggtcgaagctctgctcaagatagtgctcaccctcggcacgaagagattcgagctttttcgacgcgctgagctcggtgatcggctctttgccgatcgtgtgcttgagccagtagatgaagcgcgtgacggccacgccgtccttgatgtgggcgaggcgctcgttctcctgctcggcgggcgttttcatcgccttcatcagctgaatggggctcgtgcggtcgagcacttcggcactctccggcacgctttgcagaatgcggtagttggcgcgctcgccgtcgagcaggacgcgggtgcccgcgctcagcgccgcgaccaaacggtagatatcgtcatagggtgcgagctccacgccgtcggccttgagatgcgcttcgatctctgcactcacggcctctctctgcacgcagagcgtggccttgtcctgctcaagcagcagatacgagaggaacacaggtgtgaagagcacgtcgttgccgcgcagattcagcagccacgcgacctcgtcgagggacgggatgacgaacacgcttgcgcccatctccttcatcttgccgcgcaccatttcgagcttttccctgcgcgtcaggcctgcatactttacgtccagctcccacaccggctcgcacgagagtgcggggcggtccgcccacacaaggtcgacaaggtcctcgtcgcccgcaaagcggatgtgcttctcgcgcgttttctcgccaatcgaacgggcgaagttgttgctgatcgtgcgcgagtcgaagccgatccagccgttttcaggaacgtggtcgcgcaggaacgcggggatctcaggcacgccgggctggcccatgcgcatgagctcaataccgctgccttctaactgctgcgaggcctgcagaaagtagcggccatccgtccacagcgcggcggcgtccggcagcacgacgagcgtaccggcagagccggtgaagccggagagaaattcgcgcgccttgaagtgcgcgccgacatattccgaggtgtggaagtcgtcggtcacgacgacgtaggcatcgatatggcgcttggccatctccgcgcgcaaaagtgcgagcttttcgacaggattcatcacaaaatcactccatttctttgatacgatagcccttgccttattcggcaaagctctccgtcagcgtgatgagcacgttcgtcatggcctcaaggctgtccgcggggatccactcgcgcacgccatgatagttgtagccgccggtggagagattggggcagggaagcccgtcccaggacaggcgcgcgccgtccgtgccgccgcggatgggcacgcactgcggctcgacgccgttggcgcggaaggcgttttccgcgcgctcgatgaggtggaagtgggggaggatcttctccttcatgttgtagtagctgtcgctgatctgggcctcggccgtgccgtcgccgtaaatttcgtcgaggcgcgcggcgcagtcggcaaagagtgcctttttctcttcaaagcgctcgcggtcgtggtcgcggatgatatagcgcagcgtcgcctcggtcacgctgccgctcatctcggtcaggtggaaaaagccctcgtagccgtcggtcttctccgggacttcgtcctcgggcagcatcgcgtggaaggccatcgccgcggtcgcggcgttgatcatcacatttttggcgctgccggggtggacgccgacgccgtgcaccgtcagaacggcggacgcggcgttgaagttttcaaattcgatctcaccgagcgggccgccgtccacggtgtagccgtagtcgcagccgagctcctgcacgtcgagcccgtccacgccgttgccgatctcctcgtcggtcgtgaagatgacgcgcacctcgccgtgcttgacgtttttctcgatcatcgtttcgaccgcggccatgatctcggcgacgccggccttgtcgtccgcgccgaggagcgtcgtgccgtcggtgacgatgagctcttcgcccacatggctttcaaggccggggcagagcgcctcggtgagggagacagtgtcgttgagcttcagctcgccgccctcgtagcgcacgaggcggggcttgacgttttcgcccgaagcgtcgggagcggtatccatgtgcgcgatgagcgcgatgacgggcgcgtccacgccctcgctcgcggggagcgttgcgagcacgttgccgcagtcgtccatgtggacgtcctcgagcttcagcgcttcaagctcctgcatcagcacgcggccaaggtccttctgccgctccgtggagggcgaggtgccggtgaattcatccgaggtggtgtaataggtcacatagcgcagaaaacgcgatttggcagattccattttggggtacctccttgcagtcatgctgcgtgatagttcacgctcagtgtaccacaaaagggggcgaactgtaaagccgcagcgcaccgatccgcgcaaaagtgaaacggtgcaaaagattcttttgcttgacaaagggcggcagttgataatatagtgtgatacatattaaataagaaactgggagggaagaggaaaaatgaacgtggaaactatcacgagccggcagaatccgctgatgacgcacctgcgcaagctcgcttcctcccggccttaccgcaaaaagagcggcgaatatctctgcgacgggacaaagctcttggacgaagcgctcaagtggggcgcgccggtccaaacggcggtgttctctgacggtgtggagattccaacgcttcccgataccgtgcgcgccgtgcgcgtgagcgaagatatgatgcgctcggtgagcccgatggagacgccgcagggcgcactgtttacggtcgcgcttcccgagacgaagctgcccgaaacgcttgcgggtaagcactatctcgtgctggacggtgtgcaggaccccgggaacgtggggaccatcctgcgcacggcggacgcgtttgagtgcgacggcgtgttcttagtcaacgcctgcgccgacctcttcaatcccaagacggcgcgcgccacgatgggcgcgatcttccgccgcgaggtgtacagcgtcacgccggaggagcttttcgcgctgctcagtaaaagcggcgtcccgctctacggtacggcgctgcgcgaggacaccgtgccgctgtctgacgcgaacctgtccaaagccgctgtcgccatcggcagcgaggggcgcggactgtcgcagcaaatgctggatgagtgcgccaagacgctcaaaattcccatgagcccgcgctgcgagtcgctcaacgcggccatcgcggcgacggtcgttctgtgggagatgtatcgctgaaacaaacaaggaggtgctcttcatggcgggccttaaatactgggtgtggctctcggaggtcaagggactgacaaaccgctcaaagcttctgctgctcgactatttcggcacgccggagaacgtctactatgccgacgaggacgagtaccgcctcgtcgagggcatcgagccgcggcagatcgcactgctcgcggaaaaatcgttggaaaacgccgaccgtatcctcggcgcgtgttcgcggctgggactgcggcttctcacgatgcaggacgcggactatccgatgcgcctgcgcaatatctttgagccgccgtgcctgctctatgtcaaaggccagctccccgttatcgacgaggaggtcgctgtcgccatggtcggcacgcgcaaggcctcgccctacggcatcgaagcggcggagaagatcgcctacggtctgtgcaagcagggcgcggtcgtgatctccggcgcggcggcgggcgtggacagcgcatctcaccgcggcgcgctgcgcgcgggcggaaagaccatcgccgtgctcggcaacgggctggacattgtctatcctgcggagaatgaatggctgtaccgcgatatcgcggcctcgggcgcgctcatcagcgagtatccgcccgggacggcggccgaggcgtggcattttcccgtgcgaaaccgcatcatcagcggcctgagcctcgcgaccatcgtggtcgaagcgccggaaaagagcggcgcgctcatcacggcgaataccgcgcttgagcagggacgcgatgttttcgccgttcccggcccgatcgacgcgccattaagccgcggctgcaaccgtttgatcgcggacggcgcggcgggcctcatcaccgacagctgggatgtgctgcgcgagtacgaggccatctatccgcataaaatactcggcgagcgcgtggagcttccacgtatgctcggctatcaggcgcgcgaggagcaagcgcgcgccaagcaggccgcggcggaggaaatactgtcgctgccgacactgaatttgaaaaccaacgacgcggggctgaccgacgatcagatcgccattctgcgcacgctcaaagacggcgcgctgcaggtggatgacctgatcgaaaagacgcagatccccacgcgccgtgttctttccgcgctcacgatgatggagctcgagggctacgtcgaacagggcagcggcaagcatttttctttgaccgtcacactactggaggaataacattcatggcaaaaaagcatctggtgatcgtcgagtctccggcaaaggcgaaaaccattggaaaatatctcggcaaagactacgaggtcaaggccagcatgggccatttgcgcgacctgcccaagagcaagctgggcgtcgatatcgagcacgacttcgagcccgtctatcagcccatccgcggcaaggaggagctcattggcgagctcaagaaggccgccaaggacagcgacaccgtgtatctcgcaacggacccggaccgcgagggcgaagccatctcgtggcacttaaaagcgcttttgaatctggacgatgaaaaggccaagcgcgtgaccttcaacgagatcacgaaaaaggtcgtctccgagagcatcaaggagccgcgcgccatcgaccaggatttggtcgacgcgcagcaggcgcgccgcgtgctcgaccgcatcgtgggctatcagctgagcccgcttctgtggaagaaggtccgccgcggcctctccgcgggccgcgtgcagtccgtcgctgtgcgcatggtcgacgaccgcgaaaaggaaattcaggccttcgaggcgcaggaatactggacgcttgacgccgacctcaccgacgaggcgacgcacaagacctttgaggcgcactattacggcaaggacggtaaaaaggtcgagccgacctccggcgagcaggtggacggcatcattgccgacatcggcgacaagccctttaccgtgacgaatatcaagcgcacggacaagcagcgctccccgtctctgccgttcaccacttccaccttacagcaggaggcctcgcgcaagctcaacatgacgccgcgccgcaccatggccatcgcccagcagctctatgagggcgtggacatcacgggcgagggtacggtgggtctcatcacctacatgcgtaccgactcgctgcgcatctccgaagaggccatcgccgcagcgaagacgtttattttaggacgctacgggcagagctactatccaaagaccgcccgccactacaaggccaaggccggcgcgcaggacgcgcacgaggccatccgcccctcgaacgtcaacctgacgcccgagcagatcaagggcgatctgacgggcgagcagtaccgcctgtaccgcctgatctggagccgctttttggcctcccagatggcgaacgctgtgtatgacagcgtgagcgcgcagatcatggcgggcggacacgagttccacgcgagtgccagcaacctgaaattctccggctacaccgccgtttacgaggagtcccgcgatgacgacagcaaggaggaaaaagagggcacgctgccgccgctcgtcgaggggcagggcttgacgctcgaggcatatacgccgctccagcacttcactcagccgcccgcgcgctacacggacgcgacgctcatccgcgcgatggaacagaacggcatcggccgcccgtcgacctacgcgccgacggtctcgacgatcttagaccgcgaatacgtcatcaaggacggaaaatacctgcgtcctacgccgctcggcgaggtggtgacgggcctgatggaagagcgcttccccgacattgtggacatgaagttcaccgcccgcatggaggaaaagctcgataccgtcgaagagggcaagaccgcgtggaaggacgtcatccgcgacttctacggcggctttgagcgcgaccttgaaaacgccgagaaggcgcttgagggcgtgagactcaaggtccccgatgaggtcagcgaggagaagtgcgacgtctgcggccgcaacatggtcatcaagagcgggcgctttggccgcttcctggcctgcccgggctaccctgagtgcacgttcaccaagccccttgtcatcgaaatgccgggccgctgccccaagtgcggcgggcgcatgatgaagcgcaccggcgtgagcaagaagacgaacaagcagtacacgtactacgcctgcgaattctccaccagcagcgatcccgagaagaagtgcgacttcatgacttgggatgtgccgacgaaggacgactgccccgagtgcggccagacgatgttcaaaaaggcgggcaagggctttaagcgcccgtactgcatcaaccccgcgtgttcgcgctttgtgccggaagaccagcgcggctatgtgaaaaagaagaccaccgagaccgcggaagagggcgcggagagcgccgaagccgccgatgcggcggagaccgcggcaaagaagaccgccgccaggaagacgacggctaagaagagcaccaccgcaaagaaaacgagcacaaaagcggcgagcaccaagaagaccgcgacgaagaccgccgcagcgaagaaaacgacaaagaaggccgcagccgaggatggtgcagaaaagcccgcaaaaaagacggcggcaaagaagactgcgaccacgaaaaaggcggccgctaagaagacgaccaccaagtccgcggccaaaaagaccgcggagaaagaagagaactgatgcaagtaactgtgatcggtgccggccttgccggctgcgaggctgcctggcagctcgcgcagcgcggcatcgccgtgacgctgcatgaaatgaaacccgaaaagaccacccccgcgcaccacacggcggattttgccgagctttgctgctcgaattcgctgcgctcggaccagatcgaaaacgcggtcggccttctcaaagaggagctgcgccgcctcgattcgctgatccttgcctgcgcggacgcgacgcgcgtggaggcgggcggcgcgctggcggtcgaccgctacggcttttcaaagctcgtgacagagaagatccgttcacatcccaatatcacggttgtccccggcgaggtgacggccatccccgaggggaacgtcatcatcgcctcaggccccttgacgagcgacgcgctcgccgccgccatcgccgaaaagatcggcgacgggcacacgctgaactttttcgatgccgccgcgccgctcgtgacgtttgagagcgtcgacatggattcggcgtttttcgcctcgcgctacgacaaggggacggcggactacatcaactgcccgatgacggaggaggagtacgatgccttctggcagacgctcacgaccgccgaggaagcgagcgtacacggctttgaggataaaaacgtcttcgagggctgcatgcccgtcgaggtcatggcgcgccgcggacacgatacgctctgctacggccccctcaagccgcgcggtctgcgagacccgaagacggggaaagagccctatgccgtcgtccagctgcggcgcgacaacgcgcagggcagcgtctataaccttgtcggcttccagacgcatctgcgctttcccgagcagaagcgcgtgttttcgatgatccccgcgctgcatgatgcggagtttgtgcgctacggcgtgatgcaccgcaacacctatctccgctcgccggggatgctggaccgctactatcgcctgatcgcggatgaccgcatcgcctttgccgggcagatgaccggcgtggagggctatatcgagtccgcggcttcgggctttctggcgggcatcgagatggcaagaagactcgaaggcaaaccgcccgtcgatttcccgcgcgagacggccatcggggcgctggggctttacatcagcgatacgacggtctcggactttcagccgatgaacgtgaactttggtatcatgccgccgctgggctaccgcatcaagggcggcaagcgcgtgaaaaatgcgcagctcgccgcgcgctcgcttgaaaagatcgacgcgatgcgcgaggacgtgctgcgtgacaggaaaggagagtgaccccgtgaagatcatcgtcgacgccatgggcggcgatttcgccccgctcgcgcccgtcaagggcgcgctgatggcgcaggagaagtacggcgtggacatcgtcctgaccggaaaaacggaagagatcttgaaggccctgcagcagtgcggctgcaaggagctccccaagggcatggagatcgccaacgcgaccgaggtggtcgagatctgcgacgatccggccacggcctttaagcacaagaaggattcgtccctcaccgtggggctcaatatgctccatgccggcgacgcggacggctttgtcagcgcgggcagcacgggcgcgctccttgcgggcgcgacgctcgttgtcaagcgcatccgcggtctgcgccgcgcggcgctcgcgccgaccatcccgacggccaagggcaaggcggtgctcatcgactgcggcgcgaacgccgagtgcacggtcgaatacctgctgcaatttgcgtatcttggcagctactacgcgcagaaggtgctcggcgtcgaaaatccgcgcgttggccttttgaacatcggcgcggaggagagcaagggcgacacgctgcgccgcgaaacgtatcagaagctcaaggaagcgggcgaggcggggcatctcaacttcaccggcaatattgaggccaaggaagcgatgctcggcgagtgcgacgtcatcgtcgccgacggctacagcggcaacatcatgctcaagagcatcgagggcacgggcaagcttctttccatcaaattgaaggaaatgctgatgcacagcaccggcacgaagctggcggcgctgctgctcaagggacagctcggtgatttcaagaaaatgctcgacgcgaacgaggtcggcggtacggcgctgctcggcatctcgaagccggtcgtcaaggcgcacggcagcgcgagtgaggtcggtatctgcaatgcggtccgtcaggcgatggaggtcgcgcgcagcggtatcatcgacgacatcgcgcaaaatatcgacaagatgcgtattgaacagaaggcagaataacgcgaatgccaaaaagcggcaaaatgggtattgacagtacagtgcctttgccgtatcatttggaagaaccaaaaccgtgagaggaagtataagacttatgagccccgaagaaattttcaaaacgatgcagaagctgatcgtcgagcagttcgcgctcgaccccgatgaggtcacgatggacagctcttttgaggaagatcttggcgccgactccgtggatcttgtcgaactggtgatggccatggaggaagagtttgagctcgatgagatccccgaggaggagctcacctcgctcaagacggtgggcgactgcgtgcgctacctgagcacgaagctcggttaagaagaaaaaagccgccccgctttgcgcggggcgtccttttatcaggaggaaacaccatgcaggccttggaagaaaagctgcaatatcatttcaaaaatccggcgctgctcgaagaggcgctgcgccacagctcgtatgccaacgagcaccgcggcgcaaactttttcagcaacgagcgcctggaattcctgggtgacagcgtgctcggctttgtgacggcggagtatctgtttgccaagcatcctaccgcgccggagggggagctgacgcgcatccgcgcgctgctcgtgtgcgaggacagcctgcacgaggtcgcgcagcgcctggagcttggaaaatacttaaagctcggcaacggcgaggagagctgcggcggccgcacgcgtccgtctatcctggccgacgcgaccgaggcggtgtttgccgcggtgtatcttgacggcggcatcagcgcggccagcgcgctcatccaccgcgtgttgctcgataccgagcgcgaggaggtcgccgaggaaaagcgccgcgactataagaccattttacaggaattcgtgcagcgcacgccgaaccagacgctttcctaccgcctgtttggtgagagcggccccgaccatgacaagacgttctattttgaagtgctgctcaacggcggcgctgtgggcaagggcgcgggccgcagcaagaaggaagccgagcagatggccgcaaaagacgcgctcgaaaaactgacggaccagcgctgaaaagatgatcaccgactgctttgacgataagactgaacccgtcatcagcctgcgggacttttatggcgagcagaagcaccttgtcgaaacgtgcctgatcctgttttcgcaaaagatctatcagcatttgctggaagcctttccctgcgaaaagatcggcctcatcggcgcgtgcaacgggaacattcccatttaccgcatgaattacaagggaacggacgtcgcgttttacctctcgggtatcggctcggcggctgccgcgtcggagtgctatgaggcgagctggatcgtcggtgcgtcgaagttcgtgatgttcggttcctgcgggagcctgaatcgggaggcgacgaggggcaaattcatcgtcccgacggagagttaccgcggcgagggctgctcgtactatttcgctgcgccgtccgactacatcacggtcgagaatgcgcagaagctctcggccatctttaccgagctgggcgtcccgcacgtgacggggcgggtttggacgacggacgccatgatccgcgagaccgcgggcctcgtcgcgcagcgaagaagcgagggctgtatcgccgtggagatggagcttgccggcgtgcaggcggtgtgcagtttttacggcttggcactttataacttccttgaggcaggcgacgtgctggaggagagcggctacgatgtcgccaatcttcgcggcgcgaaccacgacctcggcaagctctatatcgcgctggaagcagcgctgcgcatctgaatagaatcgaaaacgccatgacgaaagtcacggcgtttcttttttgctgtttttcttcttttcaaagaggatcgacagccccgcgtagagcaggaacagcccgaacggcttgcggaagacgctgctgtcgaccattgtcgtcaaaaacgcggcggcgagcgcacagagcgtgccggtcgggatggccgcgcgcaggacggctttgttgagatatccgtttttgcgatgcgcgaagagcgagatgcccgcggttggcagaaaatagagcaggttgatggcctgcgctgtgcgctgctccacgccgaaaaagagcgtcatgcataaaagaagcagtgtcccgccgccgacgccccaggacgagaggattcccgtcaaaagcccgcagagcgcgggaaagagccagtccgtcacagaaggtacctcaccgcgccatagagcagaaacagcgcgaaaatgcgcttgagccatgtgttcggcacgttcttgaagagcctgccgccgatccatccgcctgcaagcccgccgacaaggtaggggagcgcctctccgagcggcagcgcgccgcggaacgcgtatacgagcaccgatacaaggcagaacgggaagatgacagccacgcaggtcgcgagtgccgtcttgtcggagagttttgcccacgagcgcagcaaaaagacgagcgggatgccgccgcctccgccgaataagccgttcaccgtgcctgcgagcgcgccgcagacgcggtatttgcccttttccgtcatgctgtcaccgcctttttgatgctatgtagcggccgccttaaggggcggctgcaaaaattactgcttcttgaagctctggcagtcggtgcactggtccatggtggggttggcctcgtgcgtgccgacctggatggcgttcagaccgcagtactgggcgtccttacagtggttggcgcagttggtcacggcgcagcgaatagaggtgttgggcgtgcaggagcagccgttattggtatgatcggtcatggatttgtcctcctgaaaaagttgttttggcgtttgccgcgcttagtttgcgcgcatttttgcccgctatgcaaaaggaagaacattccaataaaaaacgtccggctgatattcagccggacgttttttcagcttgtcattttagaagctcgtcgatcgcgcggtaaagttcggagagcgtctcctcgtcattttgctggatggcggcggtgacgcaggtatccatgtggttgcgcaaaatctgacggctggtcgagcggatggcggactccaccgcggcgagctggatcagcacctcggagcagtcgcggtcgtcctccaccatctttttgatggattcgagatgcccgatggcacgcgcaaggcggttgctgatctttttcgtctgctcggggtcatggacatgcccgtgcatatgggggtgctcgtggccgtgctcatggacgtgttcgtgctcgctcatggcattctcctttagaatttcagcgcgcagacgcttgcctccacggtgcggatgtacgcgcggtcgatgatctgctgggcgacggcctcgagatacggcgtgaggggcatgtcgttgtccatctcggggactttggtgcggagcagatcgtagatggcctgcgtgcccttggcgcagcgcttgtcctcgtagcagtcgagcgcctgaccgtcgcagatgagctcggcggcgaggatatacttggcgagatgcatcgagtcataggccttcttggcggcgttgtagcccatgttgacatagtcctcctggttggcgcaggtggtcagattgtcgaccacggcggggtgcgcgaggatacgcagctcgccctgaaggcccgcggaggcgtactggatcatcataaggccattgttgaagtcggcgttcttgttgaggaacgccggcagctcgctcaccaagctgttgagcaggcggtcgatgcggctgttgctcattttgcacagatccgtgatcgcgatgcagagattgtcggacgccataccagcataggtgccgtcggcattgcagcccatcagcgcgaccgcgccgccgtcctcttcatcgaagatgagcgggttgtcgacggacgagttgagctcgatggcgagcgttgtctgtgcgtccttgacggcctttttgaccgggccgtggagctgcggcatgcagcggatggacagcgcgtcctgcacgcggtggccgcggtagcgctcaagcatggggctgtccttcaaaatggcgcggatgttggccgcggtgttgatctggtcggggtgcgggcgcacggccatcaggcgctcgtccatagccatcagcgtacccttgagcacctcgagcgtgaaagagcccgcaatgtctgccgtcaagctgagcgtctgtgcatcgtagatcgcaagcgacgcgaacgcggtgacggacgtggtgccggagagcaggataaggccttctttggaagaaagcacgacgggcttgagtcccgcgcgcttgagcgcctctgcgctgtcaagcgtttcgccctgataggtggccctgccctcgccgatcatcaccatgccgatgtggccctcgagcgtcagatagccgacggagccatgaccggggacgatggggctgatgcccgcgttgagcatgtcgcggatcagcgcgagcgtttcaaaacggatgcccgtatggccggagccgaagtggcagagcatgacaaacatcattgcgcgcgtgcactcctcggcgatgggctcgccgacggcgcaggtatgggcgtagatgttgttgcgctggatcgtttcgcggtccttttcggggatgaacttcttccagttgtcgccaaggcccgtggtcagaccatagatggccttgccttcgtggctgaagcggtcgacatgggcgcggcagtggttgacgcgctcttcatattctttggaaaacgcgacctttgcgccaaagcgcgcgacgctgacaaggtcgttgatggtggcggtgccgccaagcgtaacagtgttcatatcggatcgtacctcttgaaatgtggggctcgctctcttacagggagttgtcggtcttgtagccgtcggcctcgatggcgatgtagcgcacctttttgcccatctccatctcgccgtagaacgcgacgtagtacgggcggtagaaggggcggtaggacgcgacctccatcgaggtgatgatgtggcccgaatggcggcgcatgatgcgcatggcgacgcgcttggcctgggcgatgatcttttctttgtcgaaggtggaatcctggcacatgtcgggatcgaggtcggcttcgtaaagcgggagcggctgctcgtggtagctcgcggtgcagcgcgtgccctcgacgatcatgcagatcttctgcgagttgccgcccatctggcccttgcgggtgaaaaagcgctccacaaggccgggcttgaaataggcgtcgaacacgacttcaaagctctgcaaatagagctgcttcatcgtgatcttgccgccgccgtacatggccttgccaatcaggttgccgccgccgcgggccttgacaaaggcctcggagtcggtcatcttcttttgggtgattaaaacgtccactgtgcgggaacctccttgaaacggaatgggagagtaaaaaagcaaatacgagaaagacagattccgcgagggaatcagcctaccttttcatcatacgccaacgctgggggaatgacaagccgctttttgcgcgctttgtggcaaaaacggcagagtttacacattttttcggcaagcgggaactgaaaagccgcttttttgcgaaagaaacagccgcttgccggttcatgccacttttgtgcataacgcagaaacgattgaccgtttggcatgaaaagattatactaagctaccgttgaaaaaagcgttgaatccgttgggcggcccgcatggcgaagcgggcggcgatgcgccgcggattcaacgataattcgtcggcgaagcattatgataaaataagaatgcttcatagcatcgttgtatcattgctgtggagggcggaggatagcgccccagaaaaggcaatgcagatataataagaaatcaggcaagcaataaaaagaggagatagcaatatgtctttactgaccagcaagctgagcgacgaagatcgcaagaaagcgcacgagctttttggagtgcccgagcagttcgacgaagtggccgacctgatggtgcacgaagaggaatggcaggtcattcttctgatgggcaaggagcccatgacggaaaaggagctgcgtaagctcatggagaagaaccgcctggccgcgtcgccctacgtgctcatcaaccgcatgtactcccgcaacgtactcaacaaggtcacggatgcggacgagccgacctggaagatcagcgacttctacagccgctattcctactatgcgcagtttgagtactatgagttcggctgtctgccgagagagctcatcgaggcgctctacgactggcagacagagatttatcagtcgatctatctgccgcaagtgaaggccaaggtcgccggtgagggcgtctatgtccacaaccagacgtatctgacgctcgaggagttcgataagatcatcgacgggcatcacggcagcatccatcttgtgccctgcaactgcaagagccagaagtatttccacgaccgcaagctcaatgtgtgcgtcaacatgaacgacgggccgaacagcgcggtcgaccgcggcatgggcgagcccatcagccctgaggacatgaaaaagaaggtgcgcgagttcaacgccagcggactcatgcagaacggcgaggacggcttcatctgcaactgcgacggtctgtgctgcttcccgatgcagatggcctataaggccggctcccgcctgatctatcccgaatccaactggaagatcgactggcacgaggacgagtgcgtcaactgcggcaagtgcacgaagatttgcaacttcggtgcgttctacaaggacgacaaccgcaaggtgcactacgatgtggacaagtgctggggctgcaccatctgcgcgcccaactgcccgaagcacgctatccacctgctgccgagagagcagaaggcctgagagaagcactaaggcactacgcaatagcattttggccggacggtaccctaaaagtggccgcccggcctttttcttgctttgcgcgagaaatggagagaggaagtcagcaccatggcacttatcaaagttctgatcatctttgcggtgatcctcgccctgcttaacaaacgcctgcccctttatcttgcgatgatttttggttcactcctgaagatcgtgatgttccgtctgccgctcgccacggcggggcagacggcgctgcacacgatcacgggctgggacgtctggtcagtgaaccttgcgatgtacgtgatctcggtgcttgtctacgagcttgacctgcgccatcggttcgaggatgcacagcgggcgatgaatggactaatgcgcgacccgaggctcaacacgtcgcttgcctgcatgttcatcggcctgatgcagggccccgccaccgtgacgatctgcggcggcatggtggacacgatggcgggcgaccacctcgaaaacgatgaaaaggcggcggtcgccacgtacctccgccacattcccgaggctatggtgccgacgttcacgggcgttatcgtggcgtgcagcatcagcggcatttccatttcatcgtttttcgtatggatgctcccgatggcgctgctgacgcttctggcgatttatcttgtctatctgcgccgcgtgccgcgcacagtcggtgagacgggacgcagtaagaaagagtgcgtacgcctgctcttgcggagcttgtggtcgctgctgctggcaatcgcggtgattatcgtgttttcgctgccgacgtgggccgtcgtggccgttgtcgcagccgtcaacgcgctggtcgaaaaattctccgcgcaggaggtgcgcgatacgctcatcaagggctttgacctaaagtcactgctcggtattacgatgacgtatgtcttcaaggaccttttgatccttggcggcgtgatcgacgtgctgccgacgtatttcgagcatctgcccattccggcgtttctggtgctcgtgatcctgtacgcgttcggcacgctggtcgcgggatcgagcgccgcggccgcggcctttatcccgctggcctacaccatgatcccgaacggcggcgcgtttttgctggcgctgctgatgagcgtcagcttcgcctcgagtcagctgagccccacgcacatctgcacggcgatcatctcggactatttcggcgtcacattcttcgccacggtcaaaaagctcctgccgctgtttctgctcaccgttctcatcgcctgcggctattacatgctgctgacggcggtattctgaagaaaacaaacaaggcctgtgccaagcagcacaggccttgatcgatttgctgtaaaggaaaaatcaaagggaaaacagagcaaaaaatgcagaccctttcccctaaacgggtatttcgggcgattttcagagaaaaccgggatttgaaaaacacaaaaatgcgactaatttaatataaaaagttaggattccaaacatttttgtttgaaatcctaacttctggaggtgacacccagatttgaactggggaatgagggttttgcagacccttgccttaccacttggctatgtcaccgtatggaaaaaggagcaaaatcattgctcctttttcatttgtggagcgggcgacgaggctcgaactcgctacctccaccttggcaaggtggcgctctaccagatgagctacgcccgcaaatggtgcctcaggccagaatcgaactggcgacacgcggattttcagtccgctgctctaccaactgagctaccgaggcatatcaagccgctattgcagcctgatgaatggcgaccaggaaggggttcgaaccctcgacctccggcgtgacaggccggcgttctaaccagctgaactacctggccgaatttatggtgggaacaacagggctcgaacctgtgaccctctgcttgtaaggcagatgctctcccagctgagctatgctccccactcgaaataatcgcttcggcgaacgacaagagttattatacagaataacccctgccgtgtcaaccttattttttgattttttcaaaaaactttttgaaaagggaaatgcattactttccctgctttttcagatcggcgatcatggcggtcagatcctctttggtaaagttctgcaccctgtcacagaactggcaggtgagttcagcagagccctgctcgtccacgatcttttcaagctcctttgaccccagcgacagcagtgcgcgctccgtgcgctcgcgcgagcagtagcagcggtattcgatcggatcgacggagaggatctccatgtcaaaatcagacagcaccgttttgagcagcaccgcaggatcaggattctcctttaagagattcgtcacgctgggagctgcgtagatgccgccctcgaccttggtgatgacgtcctcgcccgcgccggggaggagctggatgagatagccgcccgcggtgagcacgctgcggtcgcggtcgatgagcacgcccaggccgcaggccgacggcacctgctcggattcgacatagtaggcggccacgtcctcggcaatctcgccgccaagcaggtcgaccgtgccgacgtagggctcacgcatgttgaggtccttgatgaccgtcagcgtgccgctgtggccgacggcggtgccgacgtccagcttgccatcctcgcgcagggcgaggtcgacggcggggttctgcacgtagccgcgcacattgccctcagagtccgaaacggtcaggatggtgccaagcgggccgtcgcccttgatctgcatcgtgacgcttgcgccgttatccttgagtgcgttgcccatcatcgaacaggccgcgagcgcgcggccaagcgccgccgtggcgacaggggaggtgtggtggatctggcgggcgcgctcggtcagaccgcgcgtgtagaccgcgacagcgttgacaaagccatctttcgagatggcgcggactagacagtccttctgtgcttccatatatggttcctcactttctgatacaactgaagtaaatgcggccgtcgcgctcgttcgcgcggcgcagcttgagctcgccatgcgtgcggatggccgtgaaaccggcctcttcgagccacgcggtcaattcttcgaccgtgtaggcgcgctggtggtgctcttcaaagtcgcgctcccacgcgccgtccggctggaggcggaagaggtcgacctcgtagtcgagcattttgacgttttttcggtagcgcgtgcgccagaggcagaacacgtcctcacgctcatcgagcagcacctcgccgtcgagtttttccatttttgagacggcgtgcacgtcgaacacgagcggcccgccgggggcgatggcgtcatgcaggcgggcaaacgtgcgctgcacgtcgcgcggacgcgtcagatagttgatgctgtccaggcagcaaatagcggcgtcgactttttccaacaacttgagctgcggcatcgactggcacaaaagcagcggcgggggatcgagcgtggcgagcttctgctgcgcctgcgcgagcatttcgggcgagtagtcgacgcccgtgaccgtgtagccgcggcgggcgatgagctccgtcatcgtgcccgtgccgcaggcgaggtcgagcagtgacctgacagggcgctttgcgcgcagaaagagcttttcgacaaagtccgcgcgcttttcgtattccacatcctcggtcagctcgtcataggccgcggcgagagcttcgtagctgtccatgcccgtcgccttcctttctgcaaatatcccatatagtttagcagagagtgcgaaattagtaaagtgccgcgcccgcattttctcgcgccgcaccgctttggccgcagcggcatagactgccccaaatgaaaaaacggggaggaagcgcatgaaggagcatccgcgtttgacgctgggagaagattttgcccaggaaaaaagctggcggtgggaggacatcaccgtcctgaccgcccgcttgacgctgccgcagacaaaaggggagagccggcgcgagaagcgcttcgaccgctattaccgcgcactcgctgatgcctattttgcccgctgcgagcagaaattgctgccagatgccgcaaagacctgccgcgcggcgatggcgcgctccgccccatggcagatgacggcggtgacgcttacctaccgcgtaagcgcgcagacggaggatgcggtcgtttttacctttgaggtaaatgacggagaaagtgtcctgcgccgctgggaggaggggtgggaatgcagcgcgttcctgccgctttttaaagcggaacgtggttccgcgcttgcaacataagcgcgcgagcgcggttttgggcacccggcgggtgcggaagggggggcagcccgaaggggctgcgtctttggttctcccgcagcgtgcgggagtgcgcagtaagggggccattctctcacgtgagagaatggcccccttgaacccccaagagaacgcgaggggagggcccctcgacccccgatattgccggcctgaggcttgaagagctgcacacgctgcgcaattgggtgcggtgtacatggcttcgccatgaatcttctgcgagtcgctacgtctctcaaccgcgccttactaccgtgaggcgcgtgtgacgtttgtctggcggcagactgcgtgcggaatgcggcattgctgcgctcgccgcattgatgagactggcggtaaacggaaattagtcagcactcctacaagatcagcagagcggcagcggataatagaagcagaggcaaatcgtatagcaatgctaaacgcggctttgccgcgcgcaggcattcccattccggaggcaaaaggcttattcaaacctgagactgccaatcaaacgcctttcttttggacggtcacaccgcccgttttctttctcgggaaagaaaatggggggtgtggtcttgccgcccgcaggcggcatatccctccgcgctgtgcgcggaaaatattgtgttccggctatcgcaggaactttatttttcctcaggattgagctttgccagcatatcgatcgccatagtatagctctcgaacccgtgtccgcggatctgggcgatgcaggcgggggcggtgacggacaggtggcggaactcctcgcgcttctggatgtcggacatgtggacctcgacggcggggatgctgacggccttgagcgcatcgtggatggcgtagctgtaatgcgtgtaagcgccggggttgatgacgatgccgtcgaacgccgtgtcggcctcctgaatggcgtcgatgatcgcgccctcgtggttggactggaagcactccacggccacaccgcggctctgtgcgtgctcatagatgcgggcgcagagggcggcgtagtcttccttgccgtaaatgtccggctcgcggcggccgagcatgttcatgtttgcgccgttgatgactaagattttcatatgagtattcctcctgtgcttgccttacgcctgtttggcggcgtgggcgcggtattccttgcttttttcaagatagagcgcggcgttggccagaatgctctccttttccttctccgtcagctcgcgcacgaccttggccggggagccgaggatcatcgagccgtccggcgcgttcatcttgcccgtgacaagagcgcccgcgccgatgatgcagtcgttgccgatgacagcgccgtcgagcaccgtcgcgcccatgccgacgatcacgcggtcgccgatggtcgcgccgtggacggtggcgcagtggccgacggacacatcgtcgccgatggtgaccttgttgtggatcagggcgaggtcctgaatgttgcagcgcttgccgatgcgcacgctctgcatctcgccgcggcaaacactgttgtaccagaacgccgtgccttcacccgcgacgacgtcgccgagtacctgcgcgccctccatgatgagaattttgtcatcggtggaaaggcggttaaaattcatagacatggtttttctcctttgtgagcgggcaagcgcccgcagtatcattttttacagggcaaagttgccgttgacgaacacgggaatctcgcgcccgtctttcgtcgtgccgatgatggaaaggtcagcggtgccgaccatgaaatcgacatgcgtgttggaatcattcaggcccgcggccttgagctcttccttgctcatggcctcgccgcccttgacgcactcggggtacgcctcaccgaaggcgaggtggcaggccgcgttttcgtcgaagagcgtgttgtagaagagaatcttctggttcgaaatgggactgtcgtagggaacgagcgcgacctcgccgaagtacgacgcgccctcgtcctcggcgatggcggctttcaggatgtcctcgcccttttccgcgtgcgcctcgacaatcttgccgtccttgatgacgaagtggaagttttcaatgatgttgccgttgtgcacgagcggcagggctgcgtaaacgacgccgtcaatgccgtctctgagcggggcggtgaagacctcctccgtcggcatattggcgacgaacgggaagcctgcgcggctggtgttgtcgccgccggcccagacgtgcgtctcgggaagtttgatgttgaggctcgtgccgagggagttctggtaatagagcgaggtgaagtgcagatcgttgagctttgcgatgcggcttttgagcagcgccacatgctcatgccagcgcgcgacggcgttacccttgccgctgatgcggacggaggtgaagatcgcgtcccagagcttgtccatcgcttcctgctcgggaagagcggggaagaccttcttcgcccagctcggaatggggacggaggcgacgcaccaggggcatccgttagacatcacagcgtttacatagggctggatggccgtttcgctgcggctcgcgcgcgtcaggcggtcggggtctacaccgcgcagcgcctcgggatcacaggcggagatattgaggaatgctgcgccctcgtcagcatagccgttgagcatttctgcctgccagacggggaaaacgtcgaacacggagttgtccgcgcgcagaaagcgctcacggttcatgtagtcgtccgtccagcgcatcacgacctcgcggcagccgacgtcgtaggcggcggaggcgcacaggcgcgcaaaaaatgcgcactcgaccgggcagcggattacgacggtctggcccttttgaacgttcagacccacttcgatgagcagctttgcgtattctctgagtttattttccatggaaactcctcctgaaaaaaagaagaggcggctgtgcgtggcacagccgccttttcctatcgtacgatgccatacaacatgcatcataacacagttcatgcgcgattgaaaagagtttttcgtatttttatcagattccgagaagaagcgaggcaaagttgaagtagatcatcagcgagatggcgtccacgaccgtcgtgataaacggcgaagccatgaccgcggggtcgaagccgatcttcttggcgagcagcggcagcgtgcagcctacgaccttggccgcaaacaccgtgaccacgagcgtcaggcagatgacgagcgcgaccgtaatggtgatggggttgccgaagatcatcttgtcgacgagcatgagcttgacgaaattcgctgcggcaagcgtggcgccgcagacgaccgccacgcggatctccttccagatgacgcggaagaggtcggaaaattcgatctcgtcgagcgagataccacggatgaccgtgacgctcgcctgtgagccgcagttaccgcccgtgtccatcagcatcgggatataagccgtcagaatggcgaacgcgctgagcgcgtcttcaaagcgggcgatgatctggccggtgaacgtggccgagaccattagaagcagcagccaggggatacgggacttgtacgtctcccagacgctcgtcttgaggtatggcttatccgtcggcagcatagccgccatcttttcgatatcctcggtcgtctcctcttccatgacgtcgatggcgtcgtcgaccgtgatgatgccgacgaggcggtcttccttgtcgacgaccggaagggcgatgaagttgtacttcgagaaggtctgcgcaacgtcctctttatcctcgagcgtggagacagagatgacgtgcgtctccatgatctcgtcgatggtgtcgtcctcatcggagaggaggatcgttcgcagcgagacgataccctgcagcttgcgcgccggatcgacgacatagcagacgttgatggtctctttgtccgtaccggtgcggcggatacgcttgagcgcgtcctcgacggtcatatcgcgctttaagtcgacaaactccgtcgtcatcagcgcgcccgcgctgtcgtcggggtatttgagaatttcattgatgctcttgcgcgtgtcggggtccgcgtgctttaagatgcgcttgacgacgttcgcgggcatttcctccacgatgtcgaccgcatcgtccagatacagctcgtcaaggacctctttgagctcggtgttcgaaaagccgcggatcagcatctcctgcgcgtcgggatcgagctcgacgaacacctccgccgcgggctctttgggaaggagccggaacaaaaggggaatgctgtcctcgtccaaatcttcaaaaagcgaggcgatatccgcgggctccaggtctgcaagcaggtcgcgcagcgcggtatattgttttcgcttgagcagatcctcgattctttccagcagttcgtcgcgcatttcttcaaagccgaccataccgactcctcctttctgaagatagtgccaaatcaaagtgttcaggtgaattttgcgataaaaaaatcccccatatcctgcgtccggcgacgcggctatgggagcgacaatcaagaaacacccgcccctggcgagaaatttccttaccgttcaagctttagcatcacgaggcggtgaaactgcattagatggcaccttgctttcgatgcaacctgttcaaaccctctcatagtgtctccactactccgcggcagcagtccgtatccttgtggtagccttacctaccggacgatgtatgaacttaacggtactatattatgcacattttcccgccgtgtcaaccccttttccggctttatttctgtaaaaagtatgtcatggtgcgcttttgcgcttccctttcgtaatgggctgtgctatactacataaattaaagagaaatcgacttttgaggaggtgagcatcgcccttgcagcagtatcttgaccggcaccgctttttgaaaggcatctacctgatggtcaggcggtacttcgatcatcatgtcggccgcgacagtgcggcgctcacatactaccttttgtttgcgcttttcccgcttttgatctttttgagcaacttagtcggcatcatgtccgtggatatcagcggctttctgtatgaaattcgcgcattcatcccgcaggaggcgctcgagatcatcgagcagtatttcacttatgtcagccgcgattcaagcccacggcttttgtggttctcactgattttttccatttactttccttaccgcgcggcaagctcacttctgggctctgtccgtcgggcctacggcgagcaccggcccacgcagtttttgcgctatcagctcaagctcctgctttatacgctgagcctgattttaatggtcgttttgtccatcggactgtccgtcgtcggcgggcgggtgctgaactacgtgtcgagccacctgtcggcctatatcacgctgagcgacggcttcatccacctgtggtcgagcctgcgctttgttatcatcggcggcattgtattcttcaccatcgcgatgatgtacggccttgcgcaggagtcgcaccggatgaaccgcatctggccgggcgcggtgttctcgctcgtgatgtggctcgtattgtcattccttttttcgtattatgttgaaaacatcgcgcgctactccgtcatttacggcacgctcggcgcggtgatcgtattgcttttgtggctgtatctcgcctcggtcatgctgatcatgggggcggaattcaacagtgttttgatggtgctgcgtaagcagcacacggcggaagctgaagagaatttaggagaaacgcagaaatgaaaatcatcattgtcggtatcggtaaggtcggctacgccatcgccgagcagatgacgggcgaaaaccacgatctggtcgtcatcgaccgcgacagcgccgtgctcgaccacgttgactccatgctcgacgtcatgtgtgtggagggcaacggcgcgagcgccagcgtccttttggaggcgggcgtgcgcgaggcggaccttctcatcgccgtttcggaaaacgacgaggtcaacctcatctgctgcctgatggcgaaaaagctcggcgcgaagcacacggtcgcccgcgtacgcaaccccgagtatttccgcgatgcaccgatcctgcgccgcgagatcgggcttgatatgatcatcaaccccgaaaatgccgccgcgcaggaaatttcgcgcattctgcgcgtgccgagcgcgttcagcgtggagacgtttgcccgcggacttgtcgagctcatcggctttcagaccgaagagagcgacagccttgtcggcaagtccctcatcgactacaaccgcgaaaatcccaacagcatcctcatgtgcgcggccaagcgcggggaagaggtcatcgtgccgaacggctcgttcgtcccgcagacgggcgaccgcgtgtacgtcatcggcacgcccgcggagacaacgcgcgtactgcgctcgatgggcagggccatggcacccatccgccgcgtgagcatccttggcggcagccgcatcgcacagtaccttgcctgggtgctcaccgatgtcggcacgcacgtgacgatcgtggaaaaggacgaggccaaatgtctcacgctcgcggaaaagctgccgaaagtcactgtcatccacggcgacggcacgaatcacgacctgcttgagtccgagggcattttccactgcgacgcgttcatcgccgtgacggaccgcgatgaggaaaacctccttatggcgctcacggcgaagcgctacggcgtgaagaaggtcgtgccgaagatgtcgcgcatggggtatctcgacatcgtgaacctcacgggcctcgacacggtcatttcgcccaaggccatcattgcaagccagatctcaagttacgtccgcggccttgccaactcgcagggcagcgcggtggaaagcctgcactatatcctcggcggcgcgatcgaggccgtcgagttcaccgcgacgagtgccacgcactttctcgaccggccgctcagcgacctgcattttcgaaacggcctgctcgttgcggccatcgtgcacaacggccggatggagatcccgaacggccattcccagatccatgcgggcgaccgcgtgatcgtggtggcgaaaaagctctttttgcaggacctcaacgatattctcggctgatgtgccggctgcttgcggcaaggaagtttcattatgaaccaaaatcttattctcagaatcgtgggcgtcattctctgtatcgaggcgctttgtatgatcccgccgctgctgctgagcgtgttcggcggagggccggatcagcgggcgttcctgtatgcgctgctgatctgcggcggcgtgggcgtgctgctctcgctcatccgcgcggacaacacaagacttcagccgcgcgacggctttgtctgcgtggcgctgtgctggatcgcgctgagcgtgttcggcgcgctgccgtactttttcagcggcagctgcagctttatcgacgccattttcgagaccgtctccggcctgacgacgaccggcgcgtccatcttcccgtcgcctgcgtcgctgccgcggggcatccaattctggcgcgcgctcacgcagtggatgggcggcatgggtatcctcgttttgatgctggcgctgctgcccaagctcagtgagggcagcgtgaacctgatgaaagcggaatccccaggccccatcagcacaaagctccgcccccgcacgggtgagacggcgcgcatcctgtaccgcatctacatcgcgctcaccgtggcagaggcgctgctgctgcgcattgcgggcctcccgctgttcgatgcgatcaccacggcgctgacgacgatctctaccggcggcttttccatccgggatgcgagcatcgcgtattatcagtcgcatcttgtcaactggatcctcattttcttcatgtttgccgcaagcgtgaactttacgctcctctacctctgcgtgacgcgccgcttccgcgaggcgctcaagagcgaggagctgcgcgtttactcgctggtcgtggtcggcgcgtcggcgatgatcgcggcggacctgatcgtgcgcacggggcgcgacatcggctcggccatcgagaatgcggcctttcaggtcacaacgctcatttcaacgaccggctactgcacggaggattttgacctctggccgcagttctgccgctgtatcctcgtgctggtgatgtttttcggcggctgcgcgggctctacggcgggcggcgtcaaggcctcgcgcatcgtgcttttgtgcaaggcgctgcggcgtgatctgcggcgcgtgatgcactcgcgcgaggtgcgtcctatcacgctcgacggacatcgcgtgacggaggagactgtctcgtccgtttcggtcttcttctttgcctatatcgcgatcatgctgctcggcacgctgattttgtcgcttgacaacatcgactttaccgcggcgttcaccgcctcgctcacggccatcagcaacgtgggcccgggccttggtgcagtgggaccgacgtgcaacttcggcttcctctccggcatcagcaagctcacgatgagcgccatcatgctgctcggccgtcttgagatcatgccgctgcttgtcctcttaatgccctctgtctggcgcagaaaataaaagaaaatcaaaaagggtggatcgcaattttgcgatccaccctttttgaaaaagattcgctgcgcttcgtgccttgccgctcgcagcgcggctgcgacacacgctccgcgcaaagagtaaattccgacgcgcctgtcgtcggaatttacgatcaaacagatttcgcgtctgcggacgcgaaactctgcgaggcggtttgcctccattttagcagcagggccgagtttgtgatgataagcacgctgcctgcgttatggaccagcgcaccgacaacagggttcagtatgccggtgatggcaagtgcgatggcaatgaagttgagcgtcatcgagaacgtcatgttgagcttgatggtgtgcatcatgcgcttggagagcgcgatgaggtgcggcagctccttgacttcgtcgtcgacgagcgcgatatccgcggcgtccacggcgatgtcgctgcccacgccgcgccctggcaccatctggaaatcttcggcctcgcccggcgcctcgcccgtctcctgttgacagtagcgggtgatggccttgccgagcgggtgctcggaatagtgctccgccgcggcgcagaggcggtagagctcgtgatcggagaggaagggcagcgcgctgtgcaccagaacgaccctcggcgtgccgtaggtcagcgtaccggttttgtcaaaggtaatcttattcacggcggcgaggcgctcgagcgcgttgccctcgcggacgaggaagccgtgcttcgtcgcgttgccgatggcggccatgatggcagtcggcgttgccagcacaagcgcgcaggggcagaagacgaccagaatcgtcaccgcgcggatgatctcaccggagatgagccacgtcagcgccgcggcagtcagggcgatgacgacgatccacgtcgcccagcggtcggcaaggccgacgatcttggccttgcccgcgtcggcggactggacaaggcggatcatgcgctggatggagctgtcctcgccgacctttgtggccttcatctcgaaagcaccgaactggttgactgtgccggaggacacctcgtcgccgactcccttgtcgaccggcagcgattcacccgtcatgacagcctgattcacggacgtctggcccgatacgatcttaccgtcgacggggatggtctcgccgggcagcacacgcagcaggtcgccgaccttgacatcctcggcggggacggtcttttcctttccgcccaagatgacgcgcgcggtctgcggcgtcagatggacgagcttttcgatgcccgcgtgggcgcgggcgacggtcagctcttcaagaagaccgccgagctgcatgatgaacgcgacctcgcccgcggcgaaatcctcaccgatgcagaccgacgcgatcagcgcgagcgagacgagcacgtctgccttgatgtcgaacgccgtgacgaggccgatgacggcctctaatatgatagggatgccgcagaggatgatcgcggcccacgaggcgtcgaacggcaaggggacgagatcaaaaatgctgacgatcagcgcgatgccggagatcacgagcagtgtgatatcttttttttgtgccgcccagctctaaaaaatgctccagcttttccgttgccagtttcacggaagtgactcctttctgtaacatagggggtatgggctcattatacatatggaggtataggttataaagcgtgcaaaaagagagaagcagcacaaaactgcttctcttctttcatgtaattctgctgaaaacgggcgcgaaaggggaacgtccctgcttcagcccatgttcgaaaaacgctcgaccgccttcgtgaagctctcaatcgtattgtccgcgtcgccgtgctcgatgccgtcacgcacgcagtgcttgatgtgcccctcaagcacgaccttgccgcagccgtgcagcgcggatttggccgcgttgatctgcgcaaggatgtcctcgcaggggacgtcctcgtccaccatgcggtcgatggcctgcacctggccgatgatctttttgagccggcggtgcagattgtcggcgtccatacactgttgcatcgtttggcctccatacctgttggggtatccgcattgtacactctgcgccgcgattttatcaatatgcgctgccgcggcggttttgtgcgcctttggcgaaaaaatggcgttttgcggcaattttctcctcctccgcggtgttgcagagcaaaaaaaagtgtgataggatatattagaaatagtatgaccggcggccatattgccgccggagcaattttgaggtatccgaatgaagaaaagcgacaaaacaccaaagcagacccaccgccgcgcagacccgaatgtcatgggcctccacgcggacgtggtggagcagaatatcactgagacgctcgaaacgaactacatgccctacgcgatgtccgtcattgtctcgcgcgccattccggagatcgacggcttcaagccctcgcaccgaaagctcctttacacgatgtataagatggggcttctcactggcgcgcgcacgaagagcgcgaacatcgtgggccagacaatgcgattgaacccccacggtgacgccgcgatctatgacacgatggtgcgcctttccaagggctacggcgcgctgctgcacccgttcgtcgattcgaagggcaacttcggtaaggtctattcgcgcgacatggcgtgggcggccagccgatacaccgaggccaagcttgcgcccatctgcgccgaactcttccgcgacatcgactctgacaccgttgattttgtcgacaactacgataactcgatgaaagagccggcgctgctgccaacaacgttcccgaatattctggtctcggccaatcagggcatcgctgtcggtatggcgagccagctgtgcggctttaacttgggcgaggtctgcgacacgacgatcgcctttttgaaaaatcctgaggtgcgcatcagcgaaacgctgctcgcgcccgacttcccgaccggcggcgaggtcctgtacgacccgcgcgccattgaggacatttacaacaccggccgcggcggcataaaggtgcgcgcccgctggcgctacgacaaaaaagaaaatctcatcgaaatttatgagatcccctacaccaccacgaccgaggccatcatggacaaggtcgccgaactcatcaaggcgggcaaggtcaaggaaatttccgacatgcgtgacgagaccgacctttccggtctcaagctgacgatcgacctaaagcgcggggccgaccccgacaagctgatgcagaagctcttcaaggcgacgacactgcaggatacggcgtcgtgcaacttcaacgtcctgatcggcggcatgccgcgcgtgatgggcgtgcgcgagcttttagacgagtggtgcgcgtggcgcaccgagagcgtcaagcgccgcgtgtacttcgtgctcaaaaagcggcaggacaagctgcacctcttaaagggccttaaaaagatcctgctcgacatcgacaaggccatcaagatcatccgcgagacggaaaaggaggccgacgtcgtgccgaacctgatgatcggcttcggcatcgaccagatccaggcggaatatgtcgccgagatcaagctgcgcaacatcaaccgcgagtatatcctgaagcgcgtggaggagacggcatcgctcgaggcggagatcgaagacctcgaggatacgctcgcgcgcccgtcgcgcatccgcaagatcatcgtgaccgagcttgaggatgtgcgcaaaaagtacgccgagccccgccgcaccggcatcctctacgactatgccgaggacgccgagagcgaggaggacgccatcgaggactatcccgtgacgctgtttttgtcgcagcacgggtacttcaaaaagatcacgccgcagtcgctgcgcatgtccggcgagcagaagttcaaggaggacgacgcgctcagcatgagcgtggagagctccaacgccgccgagctgatgttcttcaccgataaggcgcaggtctacaagacacgcgcgagtgactttgccgacggcaaggcgagccagctgggcgattacctgcccgccaagctcggcatggacgagggcgagagcgtcatgggcatggtgctgccgggcgactacagcggctatatgatcttcttcttcgaaaacggtaaggccgcgaaggtcgagctgtcggcctacaagacgacctcgaaccgccgccgcctgaccggcgcttacagcgacaagagcccgctcaaggcgcttttgcaccttaaagaagaccgcgagatcgccgtctattcgacagagccgcgcgtgctgatcgtcaacacggcgcttctcggtgtgaagacgacgcgcacgacgcagggcgtcgcgcttttgacgctcaaaaagaagtacgtgctcgacacggtgcgcttcccggaggagaccggcatcaccgaccttgcccgctaccgcggccgcagcattcccgcgacgggcgcgctgctcaaggcggaggacagcgacgacaagcagctctcgctgatttgacgtcggaagcctgagagaaacatgtgaggggagaaaatttatgaaaaataaaaaactgcgcgagcaggtgaaaagctatatcattgtcacgcttgcctgcgtgctgtatgccttgtcgttcgattggttctatgcaccgaatggctttacggtcggcggctttacgggtatttcgcagatcattaacttttttgcacccattctgccgatcggtacgatggtcatcgtgctgaatgtgccgctttttatcgtggggcttaaaaaattcggtttcgcgtttttgtgcaagtccatctacacgatgacgctgagctccattttgatcgacgttgtcgcggcgctccacgaatttgcgcctatggacccgctgctcgcgtgcctgtatggcggcgtgacgctcggcatcgcctcgggacttttattccgcgaggagacgacgaccggcggctcggagcttggcgcatggatcgtgcggtcgcacgttgagcgcctgtcgatcggcaacatctgccttggcatcgacctgacgatcatcctgatctatgccgcggtgttccacagcctcaacaacgccctctacggcgcgctggcgctctacatcacgacgaaggtgctcgacctggtcgtctacggccagaacacggcaaaggtcgcctacatcatcagcgacaagtatgaggagattatgcaggagatgctgcggcgcgacatgggcgtgacgctcctgaacggcaagggcggctacacgggcgcggagcgtccgctgctgttctgcgccatccgcaagaaggaagcggtttcgatcaagcgctacattaaagagcttgaccccgacgcctttttcattgtctgcgacgcgagcgaggtgctcggtgagggctttggcgaatacgacccgcagggcctctaaggatatcaggatacaaggaggaagcaggaatggattttacaacggtggagaagaatctcgaggaacgcgggttcaaggtgtccgccttcgcgacggcgaaggaagcggcggactatctcaacgcgcagatcgacgggacaagcgtgtcgttcggcggtagcgtgacgctctcggagatggggctttttgaaagccttggcgcgcataacgcgatctacagccattggaacgtgccggacggcatgagcgccgccgaggtgctcaaaaacgcctcgacgtgtgacaactatctgctctcggccaacggccttgccgaaacgggcgagatcatcaacatcgacggcacgggcaaccgtgtgtcctcgtcgctctatggccacaagagggtgtggttcgtcgtcggcagcaacaagatcgcgccgacctatgacgaagcgctctggcgcgcccgcaacattgctgcaccgaaaaacgcgcagcgcctcggcgtgaaaacgccctgcgccgtgaaggctgaccgctgctacgactgcaagagcccgcagcgcatctgccgcggtcttgtcgtgctgtgggaggccatccgcagctgcgagaccgaggtcgtgctcgtcgacgagccgctcggctactgagaaagagaaatttcgcccaaaaggagggagcgccgtgcgcaaaaagttcattccactttcgctggcgctctgcctgacgctctcgggctgcggcggcaacgtcgtgcttgagcgttcctacagcgtctccgcgccgcacagcgaggtctactgggaaaacgagggtgcggacaccctgcgcgccgacagctatcaggacctcgtcaatgcgctgctgctgctccttggcgagcacagcgaggaaggcgttgtgcgtatttacagcgaggaagacgccgcggccatggccgagcaggcatgtaaggaggtgcaggaggagacggcactgggcgcgtatcttcttgactacatcagctacaccgacacgcaggagtgcgcctattacgagatgcacgtgcgcctcggctaccgccgcacggcggaggagcaggcgggcattgtcaccgcgacgagcaccgaggcgctgcctgaccttctgcgcctgacggcgcgcgagggttcgctcagccgtatcgccatgcgcttcacgtacttcaccgcggaccgtgacggcatccgcgacatggtgcggtctgtgcaggaggaggtcgaccccggctttaccgagccgtggcaggtcaacttctaccccgataccgatgacgtcggcattgtcgaggtcgtgctgcgggaggcgtaaaaaggataagaaaagagcctgaacaaagcgttcaggctctttttgtgctttataggggagagagaaaacgttaggagaggatcgcgcggtcgttggcgaactcgtcgccgctggccttcgtgaactgctcaagaagatcgggcacggtcagcttctccttctcctcgcccgcaatgtcgaggatgacgtggccgtcgtgcagcatgatgaggcggttgccgtactgaatggcatcgcgcatgttgtgcgtgatcatcagcgtggtgagctggccctcgcgcacgatgcggtcagtgagctccatgaccttggcggcggtcttcgggtcgagggctgcggtgtgctcatcgagcagcagcagcttggggcgcttgagcgttgccatcagcagcgtgagcgcctggcgctggccgccggagagcgtcgagaccttggtggtcaggcgggactcaagaccgaggccgagaccgccgagcagctcacggtactgctccttttcttctttcgtcacgccccaggaaagaccgcggcgctggccgcggcgggcggcgagggcgaggttctcttcgatccacatcgagggggcggtgcccatcatcgggtcctggaacacgcggccgatgaatgccgcgcgcttgtgctcgggcaggttcgtgacgtcggagccgtcgatgatgaccttgccggagtcgacaaagaacgtgccggcggtggcgttgagcatcgtggacttgcccgcgccgttgccgccgatgacggtgacgaagtcgccgtcgttcagcgtcagactcaggccgttcagcgcggtcttggcgttgatggtgccggggttaaaggtcttataaagttccttgagttcaagcatggccgttgcctccgttctttgcgctctggggctgcaccttgcggcggaacatcttgctcttccagtaggggatggcgaggaagaccgccacgatcagcgccgtgatgagctttaagtcgttggtgttcagaccgagctgcagcacgatctggagcacgatgtagtagatgatcgcgccgatggaaacggccagcagcgtgaggccgaagttcgtgaagatcttgccgaagatgacctcgccgatgatgacggcggcaaggccgatgacgatggcgccgcggcccatgttgatgtcgctcgagccctgatactgcgccagcagcgcgccggagagggcgacaagaccgttcgagaccatcaggccaagcacgatgttcgagtttgtgttgatgccctgtgcgcgcgccatgtgggggtttgcgccggtcgcgcgcagcgagctgcccttctccgtgccgaagaaccagtacaggatggcgatgaccgcggctgtgaagagaagcagcagcggcaggggattgttcatcgagagctcgcgcacatagcgctgcgaaagcagcagcggatatttatcaacgctgagtgcctggtttgccttgctgtccatgatgcgcagattgatcgaatacagcgcaagctgcgtcaggataccggcgagaatggccggaataccgcagcgcgtgtggaaaagaccggtgacgaggcctgccagcataccggcgagcatcgcgcacagcagggcgatccagggattgaagccgccgcggatcagcatgacgcagacagcgccgccggttgccagcgagccgtcgacggtcaggtccgccacgtccagaatgcggaaggtgatgtaaacgccgatggccataatgccccaggcgagaccctgtgcggcagcgccgggcagggcgttcatcagcgacgaaagaaaactcatgggttctctcctcctatctcttgttgaggcaggaacgggctaagcccgtccctgcctgcggggggatgtgatcagattactcttcgatggcagtgtagccctcgagaggctcgatgccgagcgtctcgcacatggaggcgttgtacttcggggtggcctcggtgaactcgatgggcatctcggagatgtcggcctcgccggtcaggatcttggcggccatcttaccggtggtcacgccgaggtcatagtagctgatggagagggtcgcgacgccgcagcccttgcagatgccctcttcgccgcagatggcaggcacgcccgcgggaacgagaacgtttgcgatggcctcggtgttggaagcggcggtgttatcggtggggacgtagacaacgtcggagtagtcggcggcggactgggtcacggaagcgacgtcgttcgtgtcagtgaaggcgaactcctgggtctcaatgcccttgtcggagaggtacttggcgaccgcttcgatctggtagcgggagttgggctcggcggagcagaacagcaggccgaccttcgtggcatcggggaaccattcggtgatcatgttggcctgagcctcgaggtcagcgaggtcggaggtgccggagatgttgccgccgacagtgccgttgaagtcatcgaggtcgagcgcgacgccgtaagcggtgatggaggtgccgaggatgggaatgtcgctcgtggcggcagcggcggcggtcagcgcgcccgtggcgttcgccatgatgaggtcaacgccgtcggaaacgaagccgttgacgatggtggagcagttggcgctgtcgccggaagcgttcttgttctggaattcgacctggccgggcagcgcctcattcagcgcgtcgatgaagccttgggtggcagcgtcgagtgcctcgtgctgcacgagctggcagatgccgacggtgtacttcgtgccttcgccgtcggtgctgccctgattgccgtcctgtgcggccttatcgccgcagccggtcagacccgcgctcaggctgagaacgagggcaagagaggcaacaagagaaatgatgcgtttggtgttcatgctttttttcctccaatttttatttctcgctgataacaataaaacccgctgtaaggacttgtggtccatacggcgggttccttgactcaactctttttgaagtgaccttcaagtgttggttcgaaagacctttcagctacgggcatcacaaatcgctcttaccttgtccttaaagtaaaagtaagagtaatagtaaaagcgatatgcaacgttgcttacaacagtcttcatcactcaagctccaagtcctttcaaaaaggatggtagtaatatagcacacacaaaaatggccgtcaatagcatttttatccaaaaaacactatttatgtaggaatttggcagggcacagcaccgaaaagtatgctatttgcattaggaaacggcatgggtgtgttcgcaaagctcattgatcttctgttgtaagcccttgaaatcttcaaacgactcgggcctgcggcgcggatcgcgcagcagtgccgcggggtgatacacggccatcatctgaaagccgttcttttcgaaccactgcccgtgctcgcgcgtgatcttgaagtcgggcttgatgatgcgcatggccgcgatgcgcccgaggcagacgataatcttcggccgcagcagcgcgacctgacggcgaagatacccgatacaggcgtcctgctccacgccgagcgggtcgcggttttccggcgggcggcacttgacgatgttggcgatatacacatcgtcgcgcttgaggccgatgatctcgagcatgtcgtcgagcagatgaccggccctgccgacgaatggcacgccctgcgcatcctcgttcgcgccggggccttcgccgatgaataaaacttcagcattctgattgccgacgccgaagacgacgttcgtgcgcgtctcccacagcgagcattcgcggcaatttttacagtcgtgttccagagcttcccaggtatcaggcatagttgtgttctcctgtcgattttttgtcattttaccatgattcgccgcgctttgcaacgcgcgcatcgcgcatttttccatctgcgcgggccatactgagaaaaacggacacggaggaagaaatggatcatatctggtactggtttgcttacagcttttttggctattgcctcgaaaagctcttcgccgcggcgacaagctcgggccaccggctgcggcgatgcttcgtgttcctgccgctgtgtccggtgtacggctttgcgatggtcacgatcttattgctgggggcgcagcgcctgccggggccatgggaacagcttctgctcgggatgcttgcggcaacagtggtggaatacgccgtgcactggggctatgaaaggctgtttcaagtgcagttctgggactattcttcgaccaaatgcgacgtgaacggccgcatctgcttgccgttttccatctgctgggggattttgtcgatgctcgccgtgcggtatgtgcagccggttctggagggctatgccgcactgcttccagagtgggccgcggcgctcgcggtgttcctcgtcacgcttgacggcatcctgaccgcgcgcgtcctgctcacgacgcacgatatcgacgctttgacgccgcgaacgttgctccgaagtaaaagaaggcgaaccgcctgacggttcgccttcctgactttattcataaatgtttttcgatccagctccacaggtcgttatagaccacggcgcggcagtcttcgttcagaatctcgtgccgcaggcccttgtagagcttcagctccacgtcgcgcatgccggcgcggcggaaagcctcatatgcgcgcttgacgcccttgcccatctcgccgacggggtccctatcgccggagatgaagagaatgggcgtgttgcggttcatcgacgcgatgttttttggcgtgctgatgaagcggatgccgccgagcatctcatagaagagaccgatgctcgtcttctgcccgcagagggggtcggcaatgtaggcgtcaacattgttgtcgctcacgctgagccagtcgacctcggtgcggttgggcgcgaacgccttgttgtaagcaccgaaagccagcgcctccacgcgcggagagtgcgccttgaagccgtggcgcttgcccgcggccttggcaatggcgcgcccgcccgcgacgattgcgggggactggtgccccgtgcccatgatgatggcggcgtcgacggtgccgggatagcggatgagataggtgcgcgtcaggaacgagcccatcgagtggcccatgagaaaatagggaacatcgggatatttttccttcgtgcggcagcgcagggcgtacatgtcgtccacaacatgcttccagccgtcgcgcgggccgaaatagagcgtgtcggcgtccttctcggcggaaaggccgtggccgaggtggtcgttcgccacgacggcaaagccgtgctcggtcatgaattcggcaaacggcgcgtagcgcatgccgtattccgccacgccgtgcgcgatctgtaaaacgccgatgatctcaccgctctcgggtgtccactccgccgcgtgaatgcgcgaggagccgtccgacgaggggaagtaaaattccctgcaaatagccatggcgcaaaaacctcctgcatgatataatcttattcattagtatagcataagacagtccaaatgaacaagggggtatcttcatgcagcggtatattttggcgctcgatcagggtacgaccagctcgcgcgccattctgttcgggcgcgacggcagcgtcggcggacacgcgcagcagccgtttcggcagtattatccgcagcccggctgggtcgagcacgacccgaacgagatctgggagagcgagcgcgccgttgccgcgcaggccttgcgcgaatcgggccttggccgcgcggtcgcggcgatcggcatcacgaaccagcgcgagacgacgattctttgggatcgcgcgacgggcgagcccatccacaacgccatcgtctggcagtgccgccgcacggcggacatcgcggatgcgcttcgcgaaaagcgcggcgtgagcgagcttgtggccgagaaaacaggattgcacatcgacgcctacttttccgcgacgaagatcaagtggctgcttgaccacgtccccagcgcgcgggaaagggccgagcgcggcgaaattttattcggtacggtggagacatggctcatctggaggctgacgggcggcaaggtccacgtgacggactactcgaacgccagccgcacgatgctcttcaacatccacacgctttcgtgggatgaagagctctgcgcgctgctggacattccgatgaacattctgccgcgtcccgtgtccaactccgaggtctacggcacggtggcggagggcatcgaagggctcgaagagctcgcgggcgtgccgatctgcggcgcggcgggtgaccagcaggcggcgctgttcgggcagggctgctttacgcgcggacaggcgaagaacacctacggcacgggctgcttcacgctgatgaacgtcggcggcgcgccggtgcgctcgcgcgcgggactggtgacgaccgtgggctggagcctgaacggcgagacgacctacgcgcttgagggcagcgttttcaacgcgggctcggccattcaatggctgcgcgacgagctgcaggtcatttcgacctcgcacgagtgcgacattctggcagaatccgttcccgacagcggcggcatttacttagtgcccgcgttcacgggcctcggtgcgccgtattgggatatgtatgcgcgcggctgcgtcgtgggcatcacgcgcggcacgacgaaggcgcacttcgcccgcgcagtgctcgaatccatcgcctatcaggtcaccgacctgatgaccgccatgcggcaggacgcgggctgcgagatctcccttctgcgtgtcgacggcggcgcgagcgtcagcgatttgatgatgcagtttcaggcggatttgctgcgcattccggtcgaccggcccgcgatggtcgagacgacggcgtttggcgcggcatcgctcgcgggtctggccgcgggcgtgtggaaagacttggacgagctgagcactctccggtgcagcgagcgcgtcttcacccccgagcgggcgcagtacgagtgtgaggagctgtaccgcggctggaagcgcgccgtcggctgcgcgcagggctgggtcgagaaaaagtgaacgctgtcacaaaaaatttatacttttgtcgtaaattatccattgaaatgaaagccccggtagcttatactgtcaataacaaacctgaggacacggtttgaaaggagaaagtattatggcatttttcgataacttcagcaagaaggttcaggacgtcgcgtttgtggcgactgagaaggcacagcaggtcgcggccgttgccggtgaaaaggcaaatgccgttgccgataaggccaagaccgagtatgagatggcatctgagcgccgcagcatggacaagaattaccgcgccatcggcgagtggtatgtctccacgctcgagggtgacgcgcccgaagcggtcgccgatatcgtcgcggccatcaaggcctctcaggagaagctcgccgcttacgaggccgccaaggctgaggctgccgctgccaagaaggcgcaggagcccatcatcgaggtgaccatcgagaaggacgcggaagaggcagcgcccgctgcggaggaacccaaggagccttctgaagccgaggagaccaaggaggactaaatccttcccaatgtgcggcgcagctctggctgcgccgcttttttccagcttagggcaaatctggtctgcataatttgttttgttttgactatatgaataataccaggacgggatataatacggccaacaaccaaaacaaaggagcacccaatcatgaacgataaaaagatcagaaagcttgtccttgccgcactgcttgcggcgcttgtctgcgtggcgacgatggtcgtgcagatcccctctccgatgcagggctatgtgaacctgggcgactgcttcgtgctgctgtccggctggctgctgggcccctggtatggctttgcggcgggcggcatcggctcgatgctggcagacattttcctcggctatgcgcactacgctccgggcaccctggtcatcaagggcgtgatggcgctggtcgctgcgctgatgtatgaaaagatgggccgcactgcgacctcccgcatcgccagcggcgttgtgagcgagatcatcatggtgctcggctatttcggctacgcttctctcctgctgggcaagggccttgccgctgcggcaagcatccccggcaacatcttccagggtgcggtcggcctcgtggtcggcgtgctgctggtcacggtgcttgagcgcgccaaggtgacggagaagctggcataataaatttctaaagaggtgtcagatcatggcgggaatcgtacatgaggtagaaaatcatcgtctggtggaacaggcggagcaggaggcggcagaggcggcgcgcgagcttgcggagatcgcacatctgcgccgcggacagatcgtcgtcatcggctgcagcacgagcgaggtcgtgggccatcaggtcggcagctggtcgacgccggaggtggcggatgccatcttccgagggctctctagcgtattttcgcccatgggcgtgtatcttgccgcccagtgctgcgaacatttgaaccgcgcgctgatcgtggagcacgaggctgtgccgaacggcgagatcgtcaacgtcctgcctcagcccaaggcgggcagctcgtttgcgacggccgcgtacaaagcgttccgccatcccgtggcgctcgaagagatacacgccgacgccggacttgacatcggcggcacgctgatcggcatgcacctcaaaaaggtcgccgttcccgttcgcttgaagcagaaccgcatcggtcaggccattgtgctggccgcgcggacgcgtcccaaattcatcggcggcgagcgtgcgatctacgatgagtctctcaaagacggttatcctgatttcaccgattgaaccaacacagcaacagaaaaagcgcgctgcccgatctcgggcgtcgcgctttttcgtcggttcctatcaaatttttcaggcgaggaagcccttgagaatcgtgtcttcggcctcctcctcggtgagaccaagggtctggagctttaagagctggtcgcctgcgatcttgccgatggcagcctcgtggatgagctgcgcgtcggtcgaattcgcggtgatggcggggatggattcgatcgtggccttgcccatgatgatcgagtcgcactgcacatggccgaagcacttgctgttgccgacgaccacggggtggaagatctgcttggactcatcctgcgcgacagagcgggagatgacgcggccgcgcgcatcttcgccgttgagctcgatctccatgtcgctctcggcgtgctgtttgccgtgagtgagaaggcgctcggtgatgacggcctcggcgcccttgccgcagacgatcttcgtcttgcgcacggtggagtcgatgccgcggatctgcacggtatccatctggatggtcgcgccctcgtcaagatagacgatcgtggtggggttcataacgcgcgtgccgctgccgtcgccctcgccgtagtgcttttccgagtagtgcacgtgggagtttttgccaatgtagaaggtgtggatgccgtcatggcggctctcgttgcagccggagttgtggatgccgcagcctgcgacgatgtcgacgtcgcagttttcgccgacgtaaaagtcgttgtagaccatttcggtcacgccgctcttgctgatgatgacggggatgtggcactgctcgcccttcgtaccgtccttgatgcggatgatgatgccgcttttaccctcgggctgcgggtcgatggcgatgtgctcggtggactggcgcgcctcgcatccgctgtcctttcgaatgttgaacgcgccgacgggcttgcccgtcaggtcggcgatcttttcaagcagggaagcgtcgatttcggtgatcatattgtgtactacctccttacttgttcagcaccgggcaggagcccagcgtgtccgccatgatgagcggaaaaatttcttctgtgctgccgcggtgcttgagctcgccaccgcccacgacgacgatctcgtcggcgagctggatgatgcgctcctgatgcgagatgatgatcatcgtcgcaagctcgcgctggcgcagctgctcgaacgtctcagtcaggcgggcgaagctccacaggtcgatgccggcctcaggctcgtcgaagatcatcagctcgctgccgcgggcaaggagtgttgcgatctcgatgcgcttgacctcgccgccggagagggagacgtcgacctcgcggtcgagatagtcgttggcgcagaggcctacctgcgtgaggtacttgcagcacttgtccttgctgaggtttgcatcgcccgaggcgatggtcagaaggttgcgcaccgtgatgcccttgaagcgcggcggctgctgaaagccgtagctgatgccgagccgagcacgctcggtgatgccaaggtgcgtgatgtcctgaccgttgaagaggatctggccgcccgtcggcgtgacaaggcccatgatgaccttggcgagcgtcgtcttgccgccgccgttggggccggtgaagacgatgagcttgcggtcaggaatgtcgatggaaatgtcgtttaagatcgtctgctctccctcaggggtggagacggtataggtgatgtgcttcagttccagcatgaaaagaagacctccttacagaaactgccattgcttgtctttagtatggaccggatggcagagaatgaaaagttgcaaatgcaacaaaatgcgcaaaaatacaaaacaaatgtagtttaccagaaaaaatggaaaaaatcaacgagagaggtgcgattttcaagattttctttttccctgcgggaaatagggaaatatcggctctgcacgcctgaaaaatgcatgcataggatagagacgagaaccgttccggaaaggggaagaagaacatgacggaaataaaaaagccctgcgcctgcgactatgaagcatgccgcgaggtgtggaagcgcgtcgcgccgggggaggacccgtacccgatggcggacaatgcaaacacacagatgagcgcacaggatagcgagctcacgctcccgggcgcggaggcggacccttgctgcatgggcagcgaggcaagcgtatcggtcgaggtgctgcagggctttctgcgcgaggagctcggcgacgcgcaggtgtacgcgtatctctcctcgtgcacgccgcggcgcgagatggcgcgagccttccgcgcgctgagcgaggacgagaagcgccacgcgcgcgatctggctgccgcgatctacttaatcaccggcaaggcctactgcccgcgcgtgtgcgtggagcagccggatacgtgcgacctctgcgcgctgctgcgcagcctctaccacgcggaggcctgtgcgggctacaattacgcccgcgcgggggaggagacactggacctgtgcctcagcaagctgtttgcggcgatgagcgaagacgaataccgccacgcagagcttttgatgaagctcctcgggcggaagatgaatgtctgacgggcagaaaaaagcggagcaggggaaatcctgctccgctttgctgtgcttggatcattcgatcgagatgatatagtaatagaccggttggccgccgcagatcagattgacctcggcatccgggcacttgcgggtgaaggcgtcgcacgccttgtgcgcgtcctcttcattcacatcctcgccgtagaagacggtgatgaactccgcttcgcgggacgctgcctcgtcggagagcccgtcgagcagcgcggagacgtcgcggtcggtgccgagcagcttgccgtccagaagtgccagataatcgccctcgtggatgtcgaagccgtcaaaatcggaattgcgcgcggcgtaggtgatctgcgcggtggagacgcactgcgcggcgtccgtcatcgccttggcgatggcgtctgtgtcgctcatgtcgggatcgacggccatcatcgcgctcacgccctgcgggatggaggcggttgggatgactacaacggtcttctccgtcaggccgatgcactgctgtgcggccatgatgatgttcttgttgttcggcaggacgaaaacggtgtgcgcggggacctttttgatctccttgaggatgctctcggtcgagggattcatggtttgtccgccgctgatgacgccgtcggcgccaaggtcggtgaagacgttcgcaaggccctcacccgcgcagaccgcgaggaagccaaagtccttttcaggctcggcttcaccggcattttcgtgctcggcggcttcgagctcctgttcgatggcctcaaggtcgtcggtggactgggccttgccgccggcggcgagctgctgggcctgcgtgcgcatgttctcgattttcgcgagctcgagcgtgccgtacttctgcgcctcggtcagcgcctcgcccggaatgtcggtgtgaacgtggaccttgaaagcctcgtcgtcctcgccgatgacgagcgaatcgccgatgccgtcgaggaagcggcggaacggctcaatgctgcgtccgctcttgcggacgatgaacacggtgtcgaacgtgaaggtgatgtcctcttcgttgagcatggcaaaatcggccttctcctgtgcattctcttcggtgagctcgggacgctcctcgccgcgcagggcgctgagcataccgccgagaatcagcaggaagcccttgccgcccgcgtcgacgacgccggcctttttgagaacggggttcatgtcggtcgtctgcgcgagcgtgatctcgccctgggcgatggcctgctcgatgacgtactcgacgctgttgtgctcctcggccgcgttcacggcgcgctcggcagcgagacgcgaaacggtcaggatcgtgccctcggcgggcttcatcacggcgttatacgccgcggcgacaccctcctgaagcgcggcggcaaacgccgcgccgtcggcctccttgcagcccttgagctccttggcgatgccgcggaagagaagcgacagaatgacgccggagttgccgcgcgcgccgcgcagcagcgcggacgccgtgacagaggcggcctgatcgaccgtcgcgggctcgatcttcttgagctcctgcgccgcggtctggatggtaagactcatgttcgtgcccgtgtcgccgtcgggaacggggaatacattcaaatcattgatagcttgctgtgcctgtgcgatggagacggtgccgaagagcagcatctccttgaacatggcaccattgatggtatcgtgcatgggatgatgtcctcctcggtttttacagattcatgctgtcgacgcaaacgtcgatgctgcggatgcttgcgccggtgttttcgctgaccatatagcgcacctgattgatgatggagcggcagacggcggcgatgttcacgccgtgctccacaacgatgtgcagctcgatggaaatgtccccttcttcgtggggaatgatgcgcacgcccttgctcatcgcctcacggcgcagcaggtggacgagcccgtcggtcatcgagcggtaggccatgcccttgacaccaaagcagctcgtggccgcggcgccggtgatattagacagggcggcgtcggaaatgctgacttcgcccttttcggtttgtagcctgatcatggaagatactcctttctccctggtcgatataatatgaccatatcattatatacgaagcggtgcagaataacaagagaaaatattttgcgtaaaatgcgggaaaatgtcaaggactctattgaaaataaacggaaattcacgtattatggaaactaacgagttcattgcgcccgctttgggcgctgcggagggataaacatgagagtcatcacaggctcggcgcgcggacggcggctgggcgagctcaagggcatggagacccgcccgacgaccgacaaggtcaaggaaagtatttttaattgtatccagttcgacgtggaggatgcgcgcgtgctcgatctttttgcgggcacggggcagctcggcatcgaggcgctctcgcgtggggcaaaaagcgcgctttttgttgacaagcgtgcagacgcggtcaagctcgtgcgcgaaaatctcgcgctgtgccatctggaagaaaacgcgcaggtcatctgcggtgattcgctcgccgcgctcggcacgcagagcgggaggttcgacatcatcttcctcgatccgccgtacgaaagcggacttttggagcaggcgatggaaaagatcgcgcagtttgacattttatcaccccatggtataatggtcgcggaaagtccgcagaaccagacgcttcccgagcttcccgcgccgtacggactgtatcgcgagtaccgctacggcaagatcaaggtgagcatctatcaccgcgcggtggaggaagaggcatgagaatcgcagtgtttcccggctcgttcgaccctgtgacgatcgggcatcaggacattatcgcgcgcgcgtcaaagctctttgaccgcgtgtacgtgtccatcgtgccgaacgggacgaagacgcacccgatgtttacagacgagcagaagctcgcgctcatgcgcgcgagcgtcgaggagtttcccaatgtggaggctgagctcggcggcggacttctgaccgactacgcgctgcgtaaaaatgcgcagtttctcgtgcgcggtgtgcgcaacagcgtggattttgacgccgagcagcagctctcgctcatctatcgcgacgtgtcggacggcgcgctcgaaacggtgctgctgatcgcggagccgaagtttcagcacatcagctccacgatggtgcgcgagatgatcaaatacggacaagaccttgaaaaatatatgccgctgcgcgcggcggagcttgtgaaaggatggagagaagaccatggcgaacaatgatgtgcagcatcttttggatatgctttacgagatgatcgacggcgcgaagaacgcgccgctgacgagcgacaagtgcattctgaaccgcgacgaggcgctcgacctgctcgacgagatccgcgcccagctcccggtggagctttcccgcgcgcaggagctcatccgcgcaaaggaggactatgtcaaggctgccaagcgcgacgtcgagcgcatgatgcagcaggccgagcaggacgcgaagaacaaggtctccgagaccgaggtgctcggtatcgcccgcgaaaagagccacgagatcatcaaaaaggccgaggaccgctcgcgcgaaatgtaccgcgtggccaacgagtacaccgaggatgcactgcgccgcaccgaggaggccatccagatggcgctcgaggaggtcaagcagtcccgcgtgcgcttccgtgccgcctctgccgagcagatgcagaagcgccgcgaggagctggcacagtcagctgaaaagcagacgcagaacggataaaattttgtcaaaagtgacaaaaaccgacgtgtttggtagacataatctatatttgggcatagcataaaggaccgccacaagatattgtggcggcccttttttaaccaaaaccaaagtagaacatgcgttttaaaaatgcggtgcactggccgaattttcacaggaaaaagcggtaaaaggcttgaaatctcagggaaatttctgcttgcattttttatgtgaatctcgtatactcaaaacaaaggtgggggaaagtggtgtatcataccatgaaaatggcttactttcccacataagcatcagatcggacgcggcacggctttttccaaaatgaagaaaaggccgcgctttcgtgccctctgtatgcgaaaatgcacagaaaaaggaggtcagccgccgtgacgggtcagtatcagcacacgatcgacgccaaggggcggctctttatccccgcgaagctgcgcgaggagctcggcgacacgttttatgtcaccatgggcatggactcctgcctgagcatctattccgatgcctcctgggcgcgcttcaccgaaaagtttgaaagcctgccctatacgaagaccaaggccatgcgcccgctcttcgccaacgccgccaagtgcgagcccgacgcgcagggacgcatcgtcctgccgcagaagctcagagcctacgcccaccttgaaaaagacgtggtcgtgatcggcgtttcgaaccgcgccgagatctggaatgcggagaagtgggcagagatcgaggccgaggagctcaatcccgagaatctggccgccgtgatggaagagctgggattctgatatggaagagaactacggccataagccggtgctgctgcacgagtgccttgacgcgctcgccatcaagcccgacggcatctatgtggacggcacgctcggccgcgccggacattcgctcgagatcgtgcgccgcctgacgacgggccgcctcattgcgcttgaccgtgacgagaccgcgatcgaagcggcaaaccgccgcctcggcgattatttggacaaggtcacgctcgtccacagcaatttcagcgcgctcgacgctgtgctgcacgagctgggcgtccacggcgtggacgggatgctgtttgacttaggcgtttcctccccgcagctcgacgaagcgcagcgcgggttttcctacaagcaggacgcgccgctcgatatgcgcatggacgaatccgccgcactgaccgcgcgcgaggtcgtgaatacctattcttatgaagagctgcgccgcatcctctttgaatacggcgaggagcgctatgcgcccgccatcgcgaagagaatttgccagcaccgcgagcaaaagcccatcgaaacgacgcttgagctcgccgatatcatccgttcggccatgcccgcgagcgcactgcgcgaaaagcagcaccctgccaagcgcagctttcaggccatccgcattgccgtgaacgatgagctgggcgagcttccgccgatgctcgacgcggcggagaaaaatctgaaaccgggcggacggctcgcggtcatcacgttccactcgctcgaagaccgcatcgtcaagaagaaattacaggagcttgcacagggctgcatctgcccgccggaatttccggtgtgcgtgtgcggacgaaagccaaaggtcaagctcatcacaagaaagcccatcgtttcgggcgaagaagaactcgcagagaatccccgtgcccgcagcgccaagctgcgcgtcgcagaaaagtgctgacaacagccgaaaatacgcaaaagaaaggagatcgccatggccagccgcagagagcagaacatgaaataccgccgctacagcggacgagtcaatggcaatctcgcttacgatcccgcctacgaagagcgtcagcgcaggctgcgccgcgagcgtgaatacgagcgcgagcacgagcgtcagcgcgaggaattcatgcgtcccccgcagcggaaggtgcagaaaaaggctgcgcccgtccgccgtcaacgcgaaaaggtctcgctcggcacgctgtgcggctttatggcgctggccgcaatggtcgcgctgatgatcatgtgccgcgcacagctgacggaaatctccgcgcaggtcgtctccgtgcagaaggagatctccgcgctcgaggacgagcatgtcgcgctgctcacgcgctacgaaaaaacctttgacctcaccaccatcaaggaggcggcggccgcagccggtatggccaagcccagcgcctcgcaggtctactacatcgacctgtcggagcccgacagcgtggtcgtctaccagcagaagagccagaacgttttgtcgcgggtgctcacgtcgattggcaacggcgtatgcgcagtggtggaatatttcaaatgagcgaagctatacataaggagtaaggagcttccttactccttttccatctttaaggaggatgaacgactgtggcaccacgcccccagaaccagaaaagacggcccgaatccgcgcgccgcgcaaaccgcatcattcagacaagaacgctgctgcttctgggcgtgttcggcgtgctgacgtttgtgctgctcttcacccaactctatcgctggcagatcaccgagcatgacgagctccagtccgtcgctgtgcgccagcaaacgttgcgcaccacggtggaggcgagccgcggcacgatctacgatcgaaacggcacgatcctcgcgatgtccgcctcggcggaggatattttcatctctccgaaggagatcatcgaaaacgatcaggatcaaaacctgatcgcgggcggccttgctgaaattctggaccttgaccccgctgacatcctcaaaaagatggagaaaacgaactcgcagtacgaagagctcaagaaaaaggcggacgatgagctcgccgacaaggtgcgcgaattcatcaatgagaacgacctcaagggcgttttcattcgtccgacgagcaagaggacctatcccaaggggacgctcgcctcacaggtcatcggctttaccaatgacctcggcggcgcgatgggccttgaggcggcgtacaacgacgagctgaccggcgagaacggtatggtcgtcaccgcgcgcgaccgcgacggccgctccgtgctctaccagtacgaccagtatttcgacgcggaaaacggctgcgacctgcacacgacgctcgacacgaccatccagtattaccttgagaaaggtgtgcaggagctcgaggcgcgctttggcaccggcaagggcgccgagggcatcgttatggacgtcaacaccggcgcggtactggcgatggcgtcgctcccgacttacgatctgaacgctcccggcaaggtctacaacgactttctgacctccggcatgacggaggagcagatcgaggagaacatgaaggatcttctcaacaaacagtggcgcagcaaggccatcaacgacacctacgagccgggctccacgttcaaaacactgacgctcgcgatggcgcttgaggaaaacgttgtcgacctgaacacgggcttctattgcagcggcagcgtaaagatcgagggcgagaccatcaactgctccaagcgcgcgcccggtcacggccagcaaaacctgacgcaggcgtttgcaaactcctgcaaccccgcgttcatcaacatcggccttcgcatcggcaacgacaagttctaccagtacatgctggacttcggcctgacggagaagaccggcatcgacaccacgggcgaggccagcggcttcgtcaacagcgaaattaaatattcgacgctggcgctggcgtgctacgccttcggccagaacttcaacgtcacgcccatcgcgctgctggcggcgcagtgcgcctgcgtcaacggcggctacctctacacgccctatcttgtcgaagagatcaccgaccaggatggcaacgtcgtctccaagcacgactccacgcccatccgccaggtcgtctccgaggagacgtccgcgctcgtgcgcgacattatggagtatgaggtcacaagcggcacgggcaagaacggtcaggtcgcgggctaccgcatcggcggcaagaccggcacggccgataaggtcggcggcggcgtcatcgtctcgttcgtgtgcttcgcccccgcggatgacccgcaggtgatgatgctcctgacgctcgacgagccgagcaagtggaccggtacctacgtttccggcggtaacatggtcgcccccgtggcgagttccgtcatgggcgagatcctgccgtatctcggcattgagccgagctacaccgctgaagagctcgtcggcgcggataagactgtgccgaacgtcgtcggcctcagcaaggacgcggcggccgagcgcctgagcgcgaacggcttcagcttccgcaccgtcggcagcggcgataccgtcaccgaccagacgcccgcgggcggcgcgatcgtaccgaatagcgcggagatcatcctctacctcggcgcggagaagtcgactgacaagtgcatcgtcccgaacgtcgtgggcgacagcgccgcgaccgcgaaccagaagatcgtgaacgcggggctcatcatgggcgtttccggcgcgacgaacgcaagctcgtccacggtgcgcgccatctcgcagagcatcgccgcgggcacggaggtcgaggccggtacggtcgtgcgcgtccagttcagcgacagctcggtgcgcgactaaagacagcaagacccaattccgaaaggaatttttcaaacgcagttatctgagcttatttccgcattagaagacaaaacggtgcatgcgccgcctgacctgatagtcagcggccttgcgctcgattcccgcaaggtagaagagggattcctcttcttcgccctgccgggggagaaggaggacggcggcgagtttatcgccgaagccaaagcgcgcggcgcggcctgcgccgtgtgcgagcatccgccggagacggaaattccctatatcttagtgccagatgcgcacaaagcgcttgcgctttgcgcggcggtatggtatggtactccggcgggaaaactcaccgtggtcggcgtgaccggcacaaacggcaaaacgaccacgacgtatcttatcaaacagcttttggagcgcacgaagggcgcaaaggtcggcctgatcggcacgaatcagaatttgatcagtgacaagaccatcccgaccgaccgcacaacgcccgacgcgctgaccgtgcagcgcctgctcgcccagatggtcgatgcgggctgcacctatgccgtgatggaggtctcatcccacgcgctgatgcagagcagggtagaaggaatccgattccgcatcggtgttttcacgaacctgacgcaggatcatcttgactaccacggcacgatggaggcctactgcgacgcgaagtcgaggcttttcgaccagtgcgacatcgcctgcgtcaacggcgacgacgcgtggacggagcgcttgctcgcccgctttacgggcgagcggatcacattcgggcagggcatgacgaacgaccttgtcggctggcgcgcccgctacgaaaacgactgcgtgcgcttcaccgcctgcaccgacctcgaccacgaggagacgaagatcggcatccccggcggcttttcactctacaatgcgctcgcgtcgctttctgccgtgcaggcgctcggcgtgccgctttccgacgcggcgaaggcgctgacggaatgtgtcggcgtcaagggccggtgcgaggtcgtaccgctgagtgcgccgttcaccgtcatcattgactatgcgcatacgcccgacgggctcaaaaatattctctctacggtctgcggctttgccgatgggcgcgtcatcgcgctctttggctgcgggggcgaccgtgacaggacgaagcgaccccgcatgggccgcatcgccgcggcgctctcggacttcgttgttctcacgagcgacaatccccgcaccgaagatccttacgccatcctgcgcgatgtgctccccgcacttttggagagcagaacgccgttcgccgtcatcgagaaccggcgcgaggccatcggttttgcgctccatgaggcgaaagagagcgacgtggtcgtcctctgcggcaaggggcacgagacctatcaggagatcggaacgataaaataccacctcgacgagagggaggtcgtgcgcgagaggttcgcgcaagtacaaaggaaggacgccgccgacgcggcgaaggaaaacgaacatgaagatcatcattgcctgcatactgagcttcgcggtctccgcgatcacgggaaaatttctggtccctgagctgagaaagctcaaggccggacagagcatccgcgaggacggccccacctggcacgccggaaaggccggcacgccgacgatgggcggcttaatgttcatcctcggcatcttcgtctctattctgatctgcggctggaagggcatgatggcgggggactttgggcacctctatatcttcttttttgcgctgatcttcggcggcatcggctttttagacgactttgaaaaggtgaagcacaagcagaacctcggcctcacggccatccagaagttcctgctccagctcgccgcggcggtcgcgttcctctgcctgatgcgctttgagggtatgctgacgccgaacctctacgtgccgtttttcaacacgcagatcgtcatgagctggtgggtgtacatggtgtttgcggcgtttgtcatcgtcggcacggtcaacgccgtcaacatcacggacggcatcgacggcttggccggcagcgtgacggtgccggtcggcctgtttttcaccgtgctcgccatctggtggcagggctatgagcagctcggcatttatgctgcggcgctcgtcgggggacttctcggcttccttatctacaatttccaccccgccaaggtcttcatgggcgacacaggctcgctgttcctcggcggcacggtggcggcgctggcctttgcctacgatatgccgcttgtgctgatccccgccggctttgtctacatctgcgagacgctgtccgacattttgcaggtcatctacttcaaagccacgcacggcaagcgccttttcaaaatggcgccgctgcaccaccacttcgagctctgcggctggagcgaggtgaagcttgtcgctgtgttcaccagcgtgagtgcgctgtgctgtctggcggcgctgttcggagtactcaacagatttcatttttgagaaacggcttgccgtttctcaaaaatgagaggggatgcgcggcgctctgtgcctcgccgcccttggcggctcgacactcactctgcgagaagtatttttcgccacgcaccggtcgcggcgaaaaatgattaaaaatatttcgcgcctgcgggcgcgaaagtctgcgacgcttggttgcaaaatggaggcaaactcgcgcagagcgcgagtttgcaatcagtatgaaagggggaagactgcatgaccaaggaagaacgcttgctgcggcaggagcagcgcgagcgggcgaaggccatcgaggcggcggcgcgcgaagcgggccgcggaccgctggaccttccgtatcttctgctggtgcttacgctcgtgggcgtgggcctgatcatgctgttttccgccagcttcccctcggcctactatgaagagggtaaccccgcgtactacctcatccgtcagggcatttttgcgatcctcggtatcacggcgatgtttattgtcggcaagatcaattacgagcgctatcgcgcggtggcgaagatgctgctgatcttttccatcatcctgctggtgctcgttctgatcccgggcatcggcacgggccgactgacgcacggcgcgcagcgctggatccgcatcggctcgttccagttccagccctccgagattgccaaggtcggcattatcctctattttgccgatagcatttcaaagaaaaaagacaaaatggccacatttcgtgaaggtatcgtaccgtatgccgctatcctctgcgtgattgcggcgctgatggcgaaggagccgcacttttccggtatggtgctgctgctcggcgtcggcgcggtgatgatgtacgtcggcggtatccgcaactactgggtaggtctcggctttgcgctggtgctgctggtgatctacgcctttgcgaccggcatcatcacctacaactcgagccgaatcgacatctggctcgacccgttcaacgaggagtggatgcgcgataagggctatcagatccggcagagcttgctctccatcggttcgggcggattgttcggactgggccttggcaagagccggcagaagtttctgttcctgcccgaagagcacaacgactttattttcgccatcatctgcgaggagctcggccttgtcggcgcgacgatcatcatggtcatgttcgcgctgctcatcatccgcggctactggatcgccctgcacgcgcgcgaccgcttcggaagccttcttgccgtcggcgtgacgacgcagatcgccttgcaggtattcctgaacatcgcggtcgtgacgaatctgatcccgaacacgggtatttcgctgccgtttttcagctacggcggcacggcgcttgccgtgcagctggccgaggtcggcatcgtactgagtgtttcgcgccagatgcgctgacacgggaaggagaaagcggctatgaaggtcatctttacctgcggcggcacggcaggacacgtcaaccccgcgctcgcgctcgcgggctatatgcgggaaaaggacgcgggcacgcagatcttatttgtcggcgcggagcgcggactggagcgcgatttgatcgcgcacacggactatccgttccgtacggtgaacatttcatcgttccaccgctcgttcaagcccgcggagatcaagcacaaccttgtttcgctcaaaaatctcgcccacgccgagcgtgaggcgaacgcgatcttgaatgattttcaccccgacctgatcgtcggcaccggcggctacgcgagctatccgcttgtgcgctacggcgcaaaggcgggcatcccgacggcggtgcacgagtcgaacatcgtgccggggctgacgacgcgacagctggagccccactgcgaccgcatcatggttggctttgaggactgccgcgcgcactacaagcaccccgaaaaggtggtcgtgaccggtacgcccgtgcgcggtgactttttcacagtgacaaagcagcaggcaaaggaaaagctcggcatgaacgacggacgcaagctcatcgtctcgttctggggcagcctcgggtcgaacgcgatgaaccgcgcgatggcggagtttctggcactcgagagcgcaaaggagcctttctaccacatccacggcgtcggcgaaatttgctggaagccgatgcagcagtggatgcacgatgacgggttggagatcactgagcatcccgcactcgacgtgcgcgagtacatctacgacatggcgactgtcatgcgcgccgccgacctcgttatctgccgcgcgggcgcgtccacgctcagcgagctgacggcgctcggcgttccggcaatactcgtgccgtcgcccaacgtgacgaaccaccatcaggaaaagaacgcggcgctgctcggcgaccacggcgcggcgctcgtgctgccggaagagggccttgacggcaagaagctcttcgccgccgcggcgggcatcctgaacgatccgcagcggatggagacgatgtctcaaaacatggcggcgctcggcattcccgacgcgaccaagcgcatctacgacacagtgatgacgctgctcaagtgaaagagaataaaaaggaagcgagccgtgaggctcgcttcctttacttttgacgctttattccgccttcaaaatgaagtccatatagatgggattgtggtcggagtagcggtagcctgcgtccacgacatcggcggagacggcttcgacgttgtcggacacgaggaagccgtcgaccgtgacgcggaaggtcgtctcctcgttgtagggttcgttggccgtgcggcaggtggcgacggggtgttcggggtcaaacggcacgacaagggagagcccgtcggggatcgtcccctcggggatgggctgcgcccaggtgtcgttctcaccgcctttgacaccgaagatctcggcagaattgccgagtaggtccttattgaagtcgccgcccgcgacgcagtagttgccgttttcatattccgccagcatgtcggcgcagagcatttgcagctgctcggtcgcgatcgtgccgtcggatgtgtaggccgaaagatgcaggttatagagcaccagctccctgccgttttccatcgggatgcggctgacggagtagcagcgatcgaggtcgacaagcttcatgatgcccgtctcgatcggcagcgaacggcgcacggcggaagagatcgggtggcgcgagagcgtcacgataccggactggttcgcgccgtgggggttaataagaggatagaagaggtagggactgtcataattctgcgcgaagatctcgttgaattcgctgttttccatcacatcactgagataagcgtcctctgcgatgtgccagctgcgcgtgccgtcgatgtcgacctcctgaaagagggcgaagtcgggcgagaggtccttgacgagcgagacctcgccgcgcatattctcgtcgacagcctgcccgctgcgggcgcggctctccttgccgccgtccatgaagaagctgtaatcgtcgctgtacgcgccgaagcccacgttggccgacgaaacgcggtaggtgacgccggtctgcggcgcgctctccatcggcagcgcgctttcgccgccggtcgtgtgatcctgcacggagaactgcacgacgtcgagcgtctgccagtcctccacgcggtagtacgcggcaaagacatagatgacgtaagccagcacgatcaaaacgagcgccaacagaatatagagcgcaactttgagcgtttttttcatgaaaaaagactcctttcggggagaaatacaatagtctcattttgccacaaagcgggcgggaaagcaaggcaaaaagaagttgacgcgccgcggcaaaatggctatactgaaaatgcctaactatagccctgcgaaaaccggcagtcacccatttcccgcaaaagccatacgatggaaaagtaatgtgcttgcgggagggaacatgatgtgtgagctgttggtagagggcggggagcgcctgtacggagaactcacgatacaaggctcaaaaaacagtgtgctgccgattttggcggcgacgcttttgtgcgcggacacctgcgtgatcgaaaattgtccgaagctgcgggacgtggatgcgtccgttgccattttgcggcacttgggctgctgcacgcactgggaggacagtgcgctcgtggtcgacacagcgcgcatggaccgcgcggtcgtgcccgacgcactgatgcgagagatgcgctcgtcggtcatctttctcggcgcgattctggcgcgctgcaaggaagcgacgatctgctatcccggcggctgcgagctggggccgcgtcccattgacctgcacttaagcgccctgagcgccctgggggcagagatcagggagacgggcggcgagctcaagtgccgcggcggaacgcttctcgggagcgatgtgtacttacccatgccgagcgtgggcgcgacggaaaatgcgctcctctgcgcctgtggcgcagacggcgtgacaacgatctacaacgccgcgcgcgagccggagatcgtcgatttacagaactttatcaacgcgatgggcggcaacgtccgcggcgcgggaggctcgatcatcacggtcgagggcagacgcgcgctgcacggcgggaaataccgcatcatcgccgaccgcatcgtgggcgcgacgtatctctgcgccgcggcctgctgcgggggagaggtacgccttcgcggcgtcgacccgcggccgctttcgactgtgtccggcgcgctgagcgaggcgggctgcacggtcaaaagcggggaggacgatgttttcctccaaagtgatggcagtcttagatccatccgccctgtgcgcacggcgccctatccgggctttccgacggacgcgcagccggtgctgatggcggcgcttttgaaaagcgcgggcagcaccgtttttgtagagaatatttttgaaaaccgttaccgccatgtcgacgagctggcgcgcatgggcgctgaggtgcgcgtcgcaggacgcgtggccgtcgtcacgggacgcgagcacctgcacggtgcgcgcgtcaagtgcaccgaccttcgcgcgggcgcggcgcttgtgattgcgggcctgcaggccgacggactcacgcgcatttcgcgcatcgagcacatcgaccgcggctatgagagcattgagcgcgaccttggcgtgctgggcgcgcacgtgcggcgggagacgagtacataagcaaatgaagaaaaaggcaggaaaactatggcgtcaaagcgaagaaacagacggcgcaggcggggaagagcctctttcccgctgagacttttgtgcctcgcggtcgtgatcgccgcatttctcggcgcgctgacgatgttcttccgcatcgatatgatcgtggtggagggcaacgagcgctatacagaggagcagatcatcgaggctgcgggcgtgcagaaggagcagaaccttgtgctgctgaacaaatataaggtcaaacaatccattttcgacacgcttccgtatgtggagaccgttgtcatcaaccgcaaataccccgacgcgctcattctgaccgtgacggagtgctcggcctccgctgcgctgacgggcgagaatggcacatggctcatgagcgacgagggcaaaattctggagcgcgcatcgcagatccccgagggctgcgcgcgcgtgaccggctgcacgctcgtcgagcccgcggtcggcgcgatggcggcgtttgcggacggggattcgtataaattcgagcgcctgctcacgctgctgcgcacagcggaggataagcagcttctctccatgatcggcgagatcgacctgagcgacggcacggccatcacctttacctatttggaccgatttacggtcaaaatgccctgggatgcggacattgcctacaagctcgggaatgtgcgcacggtggtggagcagcttgaagccaaccagaccggcacgatcaacctgatgaacgacggcagggctgacttcatcccggaataaaggcggaagttgacgtaaaaaagtttccccgaaatggccgattgctattgaccccgcgggaaaaccgtaatacaataattaagatagcaaatacctgatattgtggcgcttgcagcggcaagtgccttgcccatacaacagattgcaggaggaaccgacatggcattcggattggagaccggtcctgaaaacgtagttaagatcaaggtcatcggcgttggcggcggcggcaacaatgtggtcaaccgcatggtgcgcaccggtgcgcgcggcgtcgactttgtcgcagtgaatacagataagcaggcgctcaacgtgtctgccgccacttataaaatccagatcggcgaaaagctgacgcacggtcagggcgcgggctccgaccctgaggtcggccgcaagagcgccgaggagagccgcaaccagatcgccaaggcgctcgaggacaccgatatggtcttcatcaccgccggcatgggcggcggcaccggtacgggcggcgcgcccattgttgccgagatcgcgcgcgaggcgggcatcctgaccgtcggcgtcgtgacgaagcccttcggttttgaaggccgccgccgcatgacgcaggcggaagcgggtatcgaagagctcaagaccaaggtcgactcgctcgtcatcatcccgaacgagcgcctcaagcatgcgaccgaccagaagatcacctttgccaacgcattcgagatcgcggacgacgtactgcgtcaggcggtgcagagcatctccgacctgatccgcgacacgggcttcatcaacctcgattttgccgacgtgaccgccattatgaaggatgcaggccttgcccacatgggcgtcggccgcgccgccggcaagaacaaggccgaggaggccgcgcgcatggccatttcgtccccgctgctggagacctccatcaacggtgcgcacggagtgctcatcaatgtcacgggctcgatggacatcggcctcgacgaggtcgagcaggcagcgtccctcgtgcaggaggccgtgcatcccgacgcgctcacgatcttcggcgcgacgttcgacgagacgctcgacgacgagatccgcgtcaccgtcatcgccacgggctttgacaaggcgcccggcgcgctggacttcaacaaggataagaagcctgccgagcagagcggcgagagcgccgctgccggtcttgcgccgctcgacttcgacaaggaaaaggccgaggaagaggccaagcacgaagatgagcccgatccgttcgacgacatcttcaaaattttcaaccgcgagcgttaaatggaaacaattcccaaaattccgcagactttggtctgcggaatttttttgtccgcatttacagcgccatttcaaaaagcgatgccagcgcatcaaaattttgcaccttttaattttgcccgaagcgcagaaagtaaatgcgccggacagagaaaaagaaatgagaaagaaaaaatttccggcgttgggcggacggctgcgcgctgcgcgcacagggcgcgccgtccgcctgtattttttgaaggggtgagagaatggatggaacgcatcgcacaaaaaagcgaacggcggcgatcctgcttggattttttgccgccgccgcgatcgcaatgccgtctgcgcaggcggcggaccggacggtcagcgagctgatccccgtcggacagaccgtcggcgtcaagctcttttccgacggcgtgctcgtcgtgggcttttccgatggggaaagtccggcgaaggactgcggactcaaggagggcgacgtcatcacggccatcggcgggcaaagcctggacaccattgaggaattccgccaacttctggcagaaaacggcgaggacgccgcggcgctgaccgtcaagcgcggcagccgcacgatcgaactgagcgcggagccggagaaggacaaggatggcgagtaccgcctcggcgcttgggtgcgcgacagtatggcgggtatcggcacgatgaccttctttgatccgcagagcggcacgttcggcgcgctgggccacggggtcacggatgtggacacgggacagcttttgccgctcgaccacggcagcatcatggacgccgcggttaaggcggtgaaaaaaggcgagtgcgcctcgcccggcgagctcaagggcgactttgacctgacgcgcgacagcggaacgctttacgccaacaccgaatgtggtattttcggcaagctctcggcagaggacgcagcaaagatcaccggcgcggcgctgccgatcgcaaaaaaggacgaggtcaagaccggcaaggcgacgatcttagccaccgtttccggcaatgaaacgcgcgagtatgacatcgagatcgaaaaaatctattcgccttccggcagcacgcgaaatttgctgctgcacgtgacggacgaggagcttcttgcgcagaccggcggcgtggtgcagggaatgagcggcagcgcgattttgcaggatggcaagattgtaggcgcggtgacgcatgttctggtggatgatccgtcaagaggttatggcatttttatcgaaaatatgctctctgcggcgggcctttcgagtgaataacctaccaagatggaagaacatttgtgttaagattccgtaaaaacaaccaagttttcgcgcaaaaagttagaaaaagatggttagattcgacataactcgcttgaaaacgctgtccaaatatgttagcttaaagccatggcagaacgaagacgtcacattttgctgctgaagctggccggctgggtcggcgaaaacttgtgtgaaaaggacgggatgacatggacaagaggatcacggtcgtattagcggacgcaaacgaggagttccgcacagcactgaaacaggcattggaagcaacgggtgagttcgacgtagtgggatgcgcagccgacggactggctgcggcgcaggatatagcggagcgaaagccgcagcttcttgtgatggatcttttgctgccgggactcgatggattcggcgtgctcgagcaggcggcgaaggacaaggtgcagatgaagacagttgtcgtctcggctctttatcgcgatcagatcgtgtcgcaggcgatgagccgcggcgtatcgttcttcatgcccaagccctgcgagctgacctcgcttttagaccagatgcgccgcgcggtcaacgagggtgaggagagcgaggacgagtcgcaggcgcttgagcgcgaggtcacggcagtgatccacgaggtcggcgtgcccgcgcacatcaagggctatcagtacgtgcgcgaggccatcgtcatcgccgtgcaggacatggatgtcatcaacgccgtgacaaaggtgctctatcccgaggttgcgcgccgctacagcaccacgccctcgcgcgttgagcgcgcggtgcgccatgcgatcgaggtcgcgtgggaccgcggtgaccttgagacgctccagcgctattttggctacacggtatccaacacgaaaggaaagccgaccaacagcgagtttatcgccatgatcgcggaccgcatccgtttacaacggaagatctatagggtgtgaggtgaagtataggcgacacaagggattttccgagtagtcaggaatttttcaaagcgataaacaaggccaaaatacaatgaaaacgctttgaaaaagctataaatctatcgccttaaagctactaactccctcaattcattgggtgacaaaaccggatgaattgggggagttttttatgtttactaacaaaatgatttggcagatcgacgagtacatgctctattgccaaagcaaacagctcagcgaaaagacaatggagagctatgagcagacacttcatctgtttgaaagatggtgtggagatgaaatgctgattgagaatgtaacggagataaccgagggatttatccgtcgctatatcaatgatttgcagacaagagggaaatatatggtgtgctgcaatgacggaacgaagaaaatgaattgcccagagcgacggagagattttcgacagccggtcagcgtgacaacgattaaggactattcaacggatgcggtattgttctatcccggcctttcatatgcgtttttcagcgtgctggaaaataaatgtgcgatatttcatctcaaatatatgaagttacatggcaatatgaagttgattcggttgttattatgcatggatactattctgaatggggagacttgtttaaaatcagaaatggtggtattgtagaatctattctctaaattgcaatataaaaggaacggaacgaccagaaaaagcagcgctggtgcagagtacaaaacgatccccgtccggcggaaccttccgccggacggggatcgttgtttttttacttttcctgtttctttttcatgcggcgctcaatatgctgcaatccccacaggcacagccaggaggcggcgccgaggagcagcgagccaagcgcaaattgctttttcttcatgtcgatatcctcatgtgtcgctttcgcgtaaaacaacgtctgcagtgaagcgcttgccgtcacgctcgactaagagcttgagcgtttcgcctgcttcatggcggcggcggacacgcagaaggtcggtggactttgtcaacgcttcgccgtcggccgctacgataaggtcacccttctggatgccggcttcctcaccggggccgccgggcgtgacctccatgacgagaagcgcgctctcgccattttctgccgtgacgggaacgggctgcaccgaaatgccgatcatcacctcgccgtgtacctcaccgtaggcgatcaggtcattgatcatataggcggtcgaggcaatgggaatggcaaagccgaggccctccacgctcgtggtggaggacgagcccatcttcatcgtgttgataccgacgacctgaccgtacacattgatgagcgggccgccggagttgccgttgttgagcgcggcgttcgtctgaatgagcgtcatcgtcacgccgtcgacgtacacgtcgcggttgatggcggagacgatgccgtcggtcagtgtgccgcgcagctccacgccgagcgggttgccaatggcgaacaccggatcgccgaccgtcagcgcgtcagagtcgccgaattccgcggcgggaaggccgctggccgcgatcttgatgacagcgaggtccttttcttcgtcaagtcccagaaggcacgcacggtaatcctcacccgtgtcgagcacgacgtagcactccgagccgcccgcgatgacgtgggcgttcgtgaggatgaagccatcctcggtgaagatgacgcccgtgccgaccatggcgctgccgtcgcgattgcccgtgagcaccgtgacggtggagggattgactttctggtagatctcctggatcgtcagcgcctcgccgtggctctcgttgtagcggagcttgacctgatcggtgttgggcaggcgcttgatggtcgtttcgccatgctcgctgttatcgtaataatcctcgtcatggtgctgctcaaaatcatcgtcgtgataggaacggtgatcgtcgaacgcgccgccgagccacagcgccgtgacgacgccgctgacgatgaacagcccgagcatgcagaaaaggaagattttaagtcctttccgctttttacgcggcgggtcctttttcggctgtccgggcagcggtgtgggctgaatgtagcgttccacgatgggcgtgaccggtgcttcatagcgcagcacgacctcgcgcggctcattgccctgcccgctctggggaatatcctgattctcgtgatccatagtgtttgcttctcctgatggggactttactgcgcggtctgcccgccggcgagcgtcacgctgaaggtgaacgtcgtcaggccgttttcgcttgtgacggcgatgtgctccttgtgctggtccagaatggtcttgaccacgtagagcccgaggcccacgccgtccttatcctcggagcgggatttgtcgctcttatggaagcgctcaaagagcagcgggatctcctcggcggggatggtctcgccctcgttgcgaaccgagatcagcgccttgccgttgagcgtcgtcacgccgagatagagcgcggagcccttgcgggcgaattttgtcgcgttttccagcagattgtagatgacctgcgtgatgaggtcgttgtcgccgagcaccatgatgccgctgtcgggaatgtcggcgtcgacgtcaagcccgcggtcggtgatcttcttctccatcgaaatgagcacgcggcgcatgctctcgcacacgtcgaacggcgccttcgtgcgcgtcaagtcgcgcgactggagctgcgagacctcaagcatgcggcgcacgagacgggaaagccgccgcgcctcgtccgagatgatgcgcaggtactccttttcctgctcgggcgggatcgtgccgtccagaatgccgtcggtgtagcctgcgatggtcgtcatcggggttttcaattcgtgggagacgtttgcgatgaattcgcggcgctggcgctcggtctcctgcaaggagtccgccatgttgttgaaagattctgccagctctgtgatctcggtcacgccctcgtaattgtgcatgcgcacgtcgaagttgccctcggcgaagcggcgcgtcgcctccgccatctcgtggatggggcgcgactggcgcatgctgacccacgcgctcacgacgaacgagagcagcagtaccgtcaccgccgtcatgaaaaacaatccaataaacgtgcgccacatcgtcgtcagcgcccgcgcgccggtcaccgccagcacaaagccgacggttgcgccctcgctcacgatcggcacgccgacgacgaagtgcgtgtcctcatagatgtcgccgagtgtggtgcgcacggcgtaggtgtcatcgctcatcgcgccctcggccacgtcctgcggcacggtcagcacgcggttgacgagagttgtatcggtcgtcagcagcaggttgccgtccgagttgcagatgagaaattctgcatccgtcacgttcgaagcgaagtctgccagctcacgcagccctgtgagcgagccgttttccatgtaggacgacaccatgtgcgacacgaccgtcgccttgctctgcatctgctcgctgcgctcgtcgatggcgtaggaatacgtcagcgcgaagaacgcgctgccgagcagcgccagcgtcagcatgacgacgctcgccgtgagcagaaaattctgccagtagatcgtgcggcagcgggtcttgacctttttgagcgtccagcgctttttctgtgttttctctttgttttcttccggcatactgaattacttcacttcgaatttatacccgacgccccagacggtcttgagcgcccactggtcgctgacgttttcgaccttttcgcggagcctcttgacgtgtacgtccaccgtgcgcgagtcgccaaagtagtcgaagccccacacctcgtcaaggagctgattgcgcgtgtaaacgcggttcggcgtggcggcgaggtgatagagaagctccagctctttgggcggcgtgtcgatcttcttgccgtcgacgatgagctcgtaggagtcgaggtcgatgatgagcttgtcgaacgtgaggcgcttgtgcgtgtcctcggggatctcgctgcggcgcagcacggcgttgatgcgcgcaagcagctccttcatttcaaagggcttgacaacatagtcgtctgcgcccatctccaggccgtggatgcggtcgttgacctcgcccttggcggtgagcatgatgatcgggcacttggacgtctcgcggatcttggcgcacacgccccagccgtcgagcacggggagcatcacgtcgagcagcacgaggtcgggctctttttccttgaattcctccacggccttgccgccgtcggcggcgatgcggacgtcgaagccctctttgtcgagatacatcttaatgaggttggaaatattattgtcgtcctccacgacaagaatattgcgtgccatgctggtttcctccttcacacaagcgtgtgtctttcttctgtgttattgtttattatacgcaaaactgtgcgcgtttcctgaacaatttgtaaaaccgtcacgcgtcctttgtgaccgcgagctcgttgagcgccgtgatgagacgcgaggacgagcggaggcgagagagcagcgtgctccaatctgcctgcacggcggtgtcagcgccgagataggcgatgcacccgccggagcgggcctgacgcgcgatgctgctcgcggcctgcgccgcggtgggaagaccgccgctgtaatccaggtcaaagtcaatgggacagtagcccgcggcgcgcacagcgcgcagcgtcttgtccgacgcgccgtagagcgcgacgagccgcgctttttcgttgcacgcggcccatagcgcgttgtttgcgcgctcgatcgcgctgagagtgcgcgcgctgccgccggaggcgtcgatgcgcagcgcggcggcgttgccgctgatgacgacgcggcgcagcagatcgccgagcgaggaaagctgctcttccgagaagagaaatgtcgccgtcgcgttgttgcttgcgagcgtgtcgagcagggcggttgcgctctcttcgtccgtcacacgcagcgcgagacagacaaggtcgcggtcgccgtcggtgttctgatccggcgtgttgccgggatcgttcgagtcgctgtgcgtcttcatgtattcgttgtagcgctgctccatggacatggccgcggcgtcgatgaacttcgcgtccgaaagcacgaccgtgtcgctcttgacgcggacgagatagccgtaggtcacgcgcgtgtagctgtagtcgagcgagaaaaactgcgtcagaaggtcgagcggcaggaacacaacgtcgctgcgcacgatggccggaccgctgtactggcggtcgttctggtcagcgacggtgccggcggcgaagttgaacgtcagcgcactgccctgccggtagacaacggcagtgctcttgtcgcggcttcgggagtagaaaaggcccaagtccgtgccggtgatgaccgtggaggggacatacagccgcccacccgaccagaacggcatcgtctcatcgctcagatctggcaaaagctggtcgttgacggcggtgaaatagacagtcgtctcggccttcgtttcgctgggggtgagggagaagaccatcagcaatacaagcagcagacacaaaaaacgcttgctcttcatttctcccacctccttgcgtattttatcttaatattatagcaatttttccgccgctttgcaatatccgcgatgcctcagccgtcataatagccgacggtggtgttcgaaaaatagtgctgcacgatttcctcggcggaaaggccctgcttggcgaggatatttgcgccgtactggctcatgccgacgccgtggccgtagcccgtgacgtggaaggtaaaggcattgtccttgcattccacggtgaacgacggcgagcgcagcgagagaatcgtgcgcaggtcattgccgcgcagcttgacgccgccgaccgtgacggaggcgacatagtccgagtcatttcgcacgatatccttgatccagtcctctgggctgccggaaaggtcggcgcccggcttggcggcaaggacgagggatttgaattccgccgccgtgaacgtcgcgaccgagtagtagttcggtacgagctcttccgtctcggggctatcgaccttttggagatacggcaggtcgttcatccacacgtcgcctgcgccctgcgtgctgccgtcggcggacgagaagaacacggcgaggatgggcgcgccgtcgtacaaaatgacctcgccgtccgtttcgctcacggcgcgtgtgagtttttcctcgtagtagacagccatgctgccccagttggccgcagcctgctcggcgctcaaatacgccttgcagcaggtgtgatcgtcgcaggcgtcggcgtcagggtggttcgcgctgccgccgccgcggatgcgatagagcgtgtaggtgcgcgcggcgatggcctgcgccttgagagcctcctcctcaaacgaggcgggcatttccgcgcgcagcacgccgagaaggtatgtgcccatgtccatctcctgaacctcgccctgaatttggacgagcagcgtttttgcgctgtctcgctcgccgggggcggcgatctcaccgctcggcaggggagattccgagccgccctgtgtgttcggcgtgtcgtcaaagcggcctgccgccgcccaggcgaggatccagatgaggccgatcaataatatcgtgatgcgaagaagctgtttcaaggcgtgttcctccctgcggcccacggccgcgatgcttaagtgacagtgtttttatcagtgtatgaccgacttgtccgcaaaatgattcatggacaaacggggatgagtgtgctatcatcaataaatagatgttttccggcgctgtgcgcgccgtattccggaaaaagaaagggttcggttttgtgaaaattcttcattggcttttgctggtgcttttttctgcggcagcggtgctggcacgcctccgcctgctggcagtcggctttgacgcggacggacttcccgtcccgatggacttaaacgccatggcgctgcccgcggtgctcgtcgtcgcagcggtcatcgcggtcattatggcgcagcgctatcccgctcagcgcgagctgtgcggcagcatggacctctacttcgcctttgaccgctcgacgcttgcggtcatgctgatggtgctcggcagctttgccctgatcggctcggcggtgtgctcgttggtgttctcgctccgcacgacgcttacgatgatcctgtccgtttttctggcagtcggcgcggcatgcctgctgtacgctacgaccgcgctgcgccgcaaggcggagttccccggcatcgcgctgcttgtgcccgtgtgcgcgatggtgcttgcgctgatcctcttctaccgcgagcacgcggcggacccgattctgcgtcattactatgtcgaaacgctggcgctcgcggcgctgacggtgctgctgctcgaatttgcggcctttgctttccgcggcggcgcgccgcggctgctgatgcccgcgagcacgatgagcgtcatcctttgcgcggcggccttggccgcgcgcccgacgcttgccgagatcctcttctacgccggcggcgcgtgcatcgcgctcggtatcggcgcggcggcggacttcaatccgtgacgccatcctacatcagaatataacgaaaaaggacgcctcgcggcgtcccttttcttataagatggaagattggatgaaaagaagctattgtctcttgcaagaattaagataaaggacgcatgttaacaaagttcgagggaaagtgttacaaaagtgttaaatgaatcgggcattatgtgaacaaattgaaatcaccgcagtgtgcagaaaaaatcggccagcacggcgcggcattcgtctttcagaatgccgcccacaagcgcggggcggaggggaaagcgctccataaagaggttcagcacgccgccgcaggcgcccatcgcctcgtcgcgcgcgccatagtagacgcgcgggatgcgcgcgttgacgatcgcgccagcgcacatcgggcagggctcgagcgtcacatagagcgtgcagccgtcgagccgccacgacttcagcgcttcatttgcctgcgcgatggcctccatctctgcgtgggaagaggtgcgctgcttttcctcgcgccggttgcggccgcggccgatgatcttaccgtccttaacgatgacacagccgacgggcacctcaccctcctgtgcggcctcgcgcgcgagagacagcgcctcgcgcatataatcttcatgctccatacttggctccttgtttgaaaagaggaatatttgtccacactttccatacactgacattgcagaggtatgggagggcgaaaacatgcgaaaggtcaatttgctgcgctgtgacatcgcgcgcgatgcatccatgcaggacttgttcagcgagctgcgcgacacgcgtgtcgcgctgtcgcaggcgtacgcgcgcttcaacgcggtctgcgcgccggagctcgtcgacgcctgcgtgtatgagatcaacgccgagctctcacgctatgactacctgctgcgccagatcaaggagcgcagcggcgaagccgtgtacaaaacgtgcagcgagggggtcgcaaaatggggataacggaaaaaatactgcttgtcctgtttgccgtgtttgcgctgctcgcggtgctcaggctgttcgccgcgccgttgaagctcgcgggcaagctgctcgtcaacacgctgctcggctttgcgctgctcggcattctaagcgcgctcggcgtgctcgccaagctttcgctggggctgaatcttttcaacgctctcgtcatcgccgtcctcggcgtgccgggcctcgcactgctgatcttgctgaggctggtgtttatttaatgtacataggacaaaagcctcgtagagtttcgtgcccataggcacgaaaagattttaatcgttttctgccgcgacatgcgcgtggcagaaaacactttgcgcgaagcgtgtgtcgaattggcctctttcagcggccaaccgaggcacaaagcgcagtgaaatattctcggagaagtgacaacgtcacttttccgaattttttgtatcccagccatacagcggataccgctgcatcgcgccgaacaatttctgcttgaggtcggggtagcgctcggagagcgactcgatgagctccttgacctcctgacggcgcgtttcgccgttggcggggcaggggttgtgcacgatgggaagatcgagctttgccgcgacattgcgcacctgctgctctttcacatagagcagcgggcggatctgcgtcacgtccgagcggctcaggtatgtcacgggctggaagcagccgatgcggccctcaaagaggagattcatcaaaagtgtttcgaccgcgtcgtcgtagtggtggccgagcgcgatcgttttgatgccatgctcgttcatcgcggtcgagagcgcgccgcggcggagcttggcgcacagcgagcagggatttttctccttgcgctccaaaaagacgacctcgtagatcggcacgtccacgcggatgtactccacgccgagcgatttgcaatacgccgcgacggcgtcgaagttcatacccggcacgcccgtttcgaccgtgatggctacgaccttgaacggcttctggtagaatttggaaaggcgcgcgagcgcggtgagcgtgacgagcgagtccttgccgccggaaacgccgacggcgaccgtctcgcccgtgtcgatcatgtcatagtccgtgacgcagcggcgcacgaggcccaagatttcctgcataagtacagctccttgcgaaaaataaaagaatttcgattttgcgatttgagaaattgagagagaatcaaagaaaacgagagaatttacgagcattgcttgcgctaaattaaaatggtgttgacatttccgcgccggaatgctataaatagactcgttccgattttaccaagggacaaagaaaatgtaaagcacgagctttcattcatagatcaatatggaggaaacacaccatgtccacttttatggcgaacaagggcaacatcgagcgtaagtggtacgtcatcgatgctgccggcaagcccatgggcaagaccgccgttgctgcggctgatctgctccgcggcaagcgcaaagtcacctacaccccgcacgccgactgcggcgacaacgtcatcatcatcaacgcttccaaggccatcctcaccggcaacaagatggagcagaagtactatcgtacgcactccggctgggtcggcggtctgaaggagaccaagtatcgcatcctcatgcaggagaagcccgagcttgcgatgcgcgtggctgtgcgcggcatgatgccccgcaacaccgtgaccaaggactccctgaagcgtctgcacatctatgctggtgatacccacgagcagcaggctcagaggcctgaagcttacgaagtctaaggaggaagagaagaatgtatcagtccaagaagccttatctgtacggcaccggccgtagaaagtcctccgtcgcccgcgttcacctcttccagaacggcaccggcgctatcaccatcaacggccgcgacatcgacgagtatttcggtctcgagaccctgaagatggtcgtccgtcagcccctcgccgctaccgaggagctcggcaaggtcgacatcgttgccaccgtcgagggcggcggcgtgtccggtcaggccggcgctctgcgtcacggcgtggcccgcgccctgctgctggtcaaccccgagtatcgcaccgtcctgaagaaggccggcttcctcacgcgcgatcctcgtatgaaggagcgcaagaagtacggcctcaaagccgcccgtcgcgcgcctcagttctccaagcgttaaccagacttccccaagagataaattccaccgcttttcagtccgtctcagggcgctgtttcgttggatttatcgaatcttttgaagttctgagagttcctgcaaagtgctgtgcctgactgcgtaaggagcgagcaaggagcaagcaaggaacaaatatcgcaagcaaaaaccgaagcctcatgagcaggagatgtatccgcaaggagaacatctcctgctttttcgttatcagctgttttcatggtgtactctcttaaatctggttgattgcctccaccagggtttcaatatccaggtgggtgtaaacacgttcggtgagcgtcatggcaccggagtgtccgacaatcttcttaatcatggtctgatccacatgcgcttctgtcagcgtggagatacaggtgtgtctggtgtcgtggggtgtgtggttgaagccgatctgctccatcaggggtgtaaaatagctgtcataatagtttctgtagtcaaagtgcttctgatcagtggtatgaagcaggtattcgcatttggagccttcataccatgccttgtaaaacggaagcactttgtctgcaatcgggactttccgcagaccgttctctgtcttactggcaatcacgtcgaagtattgttcttccagatggacatcttcctttttcaaatccaggaactccgaaatgcggcagccattgaagatcagcatcagcacgatctgatagaacgggtcctccgccagctcccacagccacttgatctcggctttggtaaacttgttccggtcacgtttgtcaggattcttgtccttgtaacggacaatatccacaaactcggaatagtccttgttgcagatgtcgttcttcatagcgtagtcatacagctgactgaacaggcccttcagctttttcaaggtgggatagttcttcccgcaggtgtccaccacaagctgtaaatccgcaagcttgatctcccggaacaccttatggtacaacgtcccgcacaccttgtaggaggcttcatagcccttcacattggagaccgagatggtgggatacttcccctttgaccagcactcatagacctcctggaaggtggccttggacgctttcacatcgaaggggttattgttgtactccgccagcatttgcaagccctccgctctggtggccgcataaccgatggtgatttgctcctgaatttgcttctgcttttcttcgtcccaatgccagccgacagtctttttgacagcatagggtcttcttcgttttccggacattttcttgacgcttccatatccgttgggtaatctcaaatagtatcaaacttcctttctcccagtgactaaagatagaatttgaaggtactttcccttcatcactgctggctgccgttttcctcggcagcctttttcatttgctccagccgctggcgatccagttcgttgcggcgctggatgcgctccatctcggtgagaacctccacttccctgtcttgcagcttggcttccgcataataggccagctctttttccatccagcggtcgaaaccctcctgatctgtccagtaggtttccagcttctcacgttcgtcccggaaatcctccaatatcatgcacagggagtcattcatttccgccgaagagtcgttccccttgaaccgcagagagcaagaccattcctcgctgtggggcggacgctgcacatcaatttcaaaccggatgcccgcttttttgttaagctggtaaagcaccgcaatcacatcggacaggctgttcagttcgatgctgggccgtctgtaaccgatcaaatctgccggagacacgttcagctccttgactatggcgttgatcatggcaatggacggttcaatctcaccgctctcatatttctggatggtacgcagggtcttgttgagccgagtggcaagctctgtctggcttaaaccggccgcttttcgtgccgacttaatccgttcgccgatttcagctggattgctgttcatttgaatcacctcgcctgtattgtaacacggagtcctgcgaattgcaagagcgtaatatgaattttttattcgcatttactcttgacaaggcgtcatggggaggatataatgtgaatgcgaattaaaaattcgcatttcagaggtgaggaggtgagaaacatggagaagaaggtttatgttgagctgccgcctttcaccggacggaatgttcccattactgagattgccgcagcaatgcacaaggatgctcagtatgtacgagttggcctgcaaaaaggcattctgaaattcggctatgccatcaagctggataattccaacgagtacaactactactgccctgaccggaaagtatgggaagaaatcggatatttccagccggaggcagcctaaaaagaaaagagccctcatcctggcagatgagaactctttcaagacagtcccaacggcagctgccgtgtgaacggtccgttcgcatggatattataacacggcagctgccaatttcaacaacgattttcaggaggttatttgaatttgacagcgttaccagacattttaagaaaagacggtctgttctgctgttggcggtatgaagaaagaaacggaaagaaaacaaaagttccttaccaaccggataccgggcttggagccaaaagcaatgatccaaacagcttcgtgtcctacgatgtcgcagtacaggcaaaaggttacgatggtatcggccttggtatcttcaatgggatttgtgccattgacctggacaactgcgtgacggacagcggttactatactggggttaccgcagagatcgttactctgatgcacagctacaccgaatacagccccagtgggaacggattgcacattctgttccgggcagacggcttccagtacgataccaaacgattttatatcatgaatcatcaggccggcattgaagtctatgtggcaggcgcaaccaacaaatatgtgacagtgaccggaaaagtatgtgagcaatatgattttggagatcgcacaaaggaactgcaaatccttttggagcgattcatggtcagaccggaaaccaatgcagcaaatgcaataaatgcagataattccagcatggatacagcgcagcttctcagtatggcaaagtccagcaaaaacggatcggcttttacttccctctgggatggttccacaatgggatacgcttcccagtctgaagcagatttggcattatgcagtcacctggcattctggacaagaaaagatgcagcaaaaatggatactatgttccgccaatccggcctgatgcgtgacaaatgggatcggcagcaatccgggacaacctatggagctattaccatccagaaagccattgaaaattgcaaagaggtctacatgccaaagcaagagactacaccgcaatttccaccattggtgccattgacgccacagtggagtgatctgccgccatttcctgtggatgcgttgcctgacacgatccgaagatatgtcagcgcagttgcggagcacagccagacagcaccagacatggcagctataatcagccttggcgtcctggcagtctgcctgcaaggcaaatacaaggtggaaggcacacctggctattatgaaccgctgagcctatacaccgtggtgattgccgcccccggcgagcgcaaatccagcgtcatgcgggatatgaccaagtatctctacgaatacgagcaggaatacaatcaatcccgcagctctgaaattcgggaaaaccgcttacagcgggaagtgttggagcgccaaatctccggtctgcaaaagaagctggaacgcagggaagatcgtgaaacagaactggagcttcggcatctgcaagagcagcttgaagatatgcccgagttgaagccggtccgcttctttgccgatgactgttccagcgaagcattgaccagcctgatggcagccaacggcggcgtgttctccgtgatctccaccgagggcggcatcttcgatattatggccgggcggtattccaacaaggccaatatcgacatctggctgaaggggcattgcggtgataccatctatgtagacagaatgacccgtgattcggaatgcatcatgcatccggccctgtccgccattctctccatccagcccagcgtgctggacgagatcatgtccaataccaccatgacaggccggggactgattgcacgattcctgtatgcgtcgccgccgtccagaattggcgggcggacattccgaactccatccgttcctcccaaagtcagcgccgcctatcgcaatctgatatttcacctgatggcattgccaatcagcgaggacactcagacgctgtatctctccgagaaagcctttgacctgatggctgactacttccaggaacacgagaggtttctggctggtgaagggcaggccatttccgattgggccagcaagtatattggcgcagttcttcggattgcaggacttctccatggtgcggatatggacgatggcgagaacgaaatttccgcatcgaccgtgagccgggcaattcaaattgggaaatactttctggctcattccacctacgcttactccatgatgggaactgatctcagcatccagaaagccaaatttgtaatggcaaaactgaaaaagaagaacgccactatgatcaaacgttctgatctttttcagatgtgccggggcaagtttttcaagaaaacggaggaaatctttccgacgttggagcttctggaagggcacggctacctccggatggaagaaccggaacggcagtcagccggcagaccggcggacgtgaggatcttcgtaaatcccgccgcagcgtgagcaggaatatactgcatttattgcatttcctgcttaaccctcgtgacccccgtccccacactgaaatccgcagagttcagtgtggaccggcagggagaatattacggacttctccctgccaacgggcgggaaatcatgagctatacaggctgcgaatgaattaccacccgtaccgtcatttgaacctcaaatgacggttgaggcttccgcagaagccgcataccccctcggagagcgcaaaacttttgatggctctgctgtcaaaagtgctttagcgttacttttgacaaaagtaacaaaacccgccgctggcgcggcgaaaagaattcttattataactactgtaaaatcggaggtgacagatataaaacggactatcagtgctatgtcaggcaagggtgtgattgagcataatcgccgcacctatattgctgaaaatgttgaccccgaacgaacgcatctgaacatcgaatactgctatatgcccatcgagcaggcgtatcatgagctgttcgatgaagctctggcagcgtacaacgtcaaacagaaacgcaaagaccggtgcatcgaaaactattacaagaaaatctgcgacggagatcaagaaaagccattttatgaggtgatcttccagatcggaaacaaggatgatatgtctgccgccagcgagaacggaaaactggcaagagctattttggacaaattcatgcgcagcttccaagagcgaaatccccatcttcatgtgttctctgcccatctgcacatggacgaagccacgccccatcttcacattgacttcattccatataccaccggaagcaagcgaggtctttccacccgtgtatctctgaaacaggcacttgccgatcagggcatcacaggcgaaggacgctccatgacagagcgtaccgtatgggtgcagagagaaaaagaagcactggctgaaatcatgttggagcatggtatcgagtgggagcaaaagggcgaacaccgggaacacctgagcgccctggaatataaacgggaacagcgcacacaggaactggctgagctggagcagacgattgtgcgtgttcaacagcagcaggtttccatcaaggctgtggaacagattgaagccaagcccctgccgctatcctccaaggtggcactggaacgagaggattatcaggctcttgttacggctgcgcagaaatttgtcgtgcaggagaaacaggaaggaaagctcaaaaagctcctgaaggaggccaagaaaaccattgctgaactgaaaagcaccattgccgatctcaaagtgcagctggttgtggctacaaaggaactctcggagtataaatctgtccgtggtaaaatccgtgcagcggaagtggagcaggaaaataacgatcttcgtagcaagctccatagctatgaagacgtgatttctcgcaacaatctgtggccttatttctcccggcacagaggaaaaacgccctcaagggatgatacccgataaatcttcagcagatagtaaacgcaaaaacgactgatgcgccgcaaaaggagttgctctcccggtatacggactgtgtccgggagtttcaggctatagcagagtgcctgcttttccagaatagcttctgcctggaagccaggatgatgctggaagtcatggaagaatagataatagttacataaaatgaggactgggtttcacttaaccgtgaaatccagtccttttgcgtgagtaatagtatgagcgattatgcgttcatctcttgaagaagtattttacatgcttcgtttctaagggaatctgctttgtcgatcattgcccatgctgtagttactctgtcgtaattgaactctacatgtggaggaacgatgaatttctcaacatcctctgggtaaacggcatcaacaactgaaccgcatgcaacagcggacaattgcgcttggacaatgggatgtgaaaaagcaagataaagataacctggatggatatcagcgtgtgcttctatacgaccaacatgtccactggcgaaccattcgtccctgctgtctgtgataagtacgggagtacccaatcttccttcgacacggccatctgctggatatgcaatccatcctttttttaagctgaagctactatatttttcggcagacgatttgggcaagtattttaatccaacagtttgattttgaagcagttggcggccggaaagaataggcaaaccgtactccttttcaacataatttgttttattccgtccccccggcttatgtatttttgcaacagtggacaactggtagccacccgcctctcgcagcttcttaacagcatcgaaggttgtccaatcgtaaaatgcggcgtctatacgttttctggaaaaaacattcttaaattgtacattccagcctttgcacagggaagtgttttctttatgaacatttacagcagaaaggaattcctccttacaactaaccaattccaagcgagcctccgagaacagctcatacgattctcgcataatggaagaaactttttcaaacacttcttcactaaaaaccgggatacgcaaagcacgaatatcgtctgcactcaaatggtcaattacggagccagtcttgcttgagtgtaacaaggcttgtcctacccatgtattcaagaaagagtagacatagaatcttgtgctggaatcatgaattgtgattctcataaggtcactgccaaatacaaatttctccaaatatttatctgaaataacaagtggccccaagtttcttccagaacacgtctgtaatattgtgccctctggtaccttaagtttatcaacaggattctggtggagcgataactgtgcccgtgcttcaggaagatactctaaaatgtcatacggctgtaagtatggcacagattcttcgccattacctgcatatactaaaatatttctattgggttgccaaacacttgcaatatctgtatcccccaaatttatatagcgaggagaatttttgattgcagtttctacaagccggaccgcaatattaccttctgaaaggtaataggatgaatcgagccgacatctatttgaaatttctgttctatttaaagtcgagattctcatagcaattcttcctgccatttcttaaaggctgccacaacatcgggcatatcgtcatccacgaccctgtccttagttccagcagaataaacaattgtctttccggttacaggatcaatagcttcctcctggttatttacatctgaaagaatctcgtttccctcggcatcccgtttatagattgtggcacctctcttgtcatgaccgatcttttctgctaccgccatgaaaatcggataatcaatatttccgctttccgcaagtgccttctcctctttgctaaaacgtctaatgagcaccattgatgtttgcgtatcatttttgggctggaacaaatctcgttgcatatcaacaacagcaataagttgagcattaagcaacaaccaagagcgaacatattccagagacggattattcaagataccgttaggaattaccattgccatcttgcctgtacctggttttagcaactgcacacatcgctcaataaacaagatttcaggaggctggcttatctgtagaacaggttcaccgtttttatctcgtcgaattgaaagctttccagtttcatcagtatcccagactgctgccaattcaaattgcgacagaatattcacatcatcaatcacaatatttgcgccgaacggtggatttgtaaagacaaggtcaaaactccccatttgaattgctgcagcagattcaggtgcccaagtatgtgggttagacaaactgttttctctgaatagtcctccggcaccatcgttattcatgaccatgttcatttttgcagctctgaccaatgctggattaagatctataccatatacgcatgtagaaaggtattctgcacgcttcctatataattcctcaatttcataggatgtcgggttatcaggatcgttccaaagagaggcttcttgctctctcagaactttcaatgcatggttcatggcagttatcaaaaagccaccagtaccacaggcggggtctattacacgctgatcggcttgtggatctaacatttctactgccattcggcacgcatttctgggtgtgaagaattcgcctcgatctcctcgtagattagagccaacgatttcttcatatgcaatacccttcacatctacaggagaagccaaaagagagtagccctgcaactgcgatactacataagccaacacatccgctgatagttcgattgtttttgtctcatcactattgaagatctttggatattttgcaacgactcgagactggaaaagcttttgaattcttgcttttgtggcacttgctttagttttatcttttaattctgaaggtgtcacataaaagttgatagtaccagaacgttcgtcttcaattttagagaaaatgactttaagtaactcccagaatgcatcatctttatgcataccagcattaccggcaatataattatggcagcgccgaaaagcaaatagcaggttatcagccgtagcaatctgaagatttttccgttcgggtctgtagatttcggcttccgtctgaccaaaggatggaatctcagggatttcatcatacaaaaatccgccatctttttctcgcttggcaatgcaatatcgttcgtcaccgtttgtccaaagtccaaattttgcatttagacaggcagccatgtaggttttaagttgctcaataccgtcctttttcccgtgaggattggttttagcttttttggtttcaataagtatatatgcattttcctgcatatgaggcttgttttcctcaaaaatcacaacatccacacgcttatttgaagatcctatttttattgatacctccggtttgcagctatcgattgggtacttatactgacgaacaagagccttttctatattttgtctgacatactcctctggcgtatcgtttacaaatcgctttgtcaaaaaatctaatatctttccatccgggatggacatgattgtactgatgcttggctctttaatttgagatgtcatcatgtgtatttctcctctactctaaataacaatcaaatgtctaaattatctttttcttttagtcgtatgtatctatcgtatgaaatgatgacggcctgtggcttgttttgtttattcacaataacaaccttgtctttttctttcacatctgaaaaaatgcgtgaggcttggcctcgcaggaactctgttatagagtgatattctggtattgcaatatggtggattttcgccacataaccacctccttttttacatacacattccataaaaactatatcaaaagtaattacttctgtcaatctttataatagttttttcgttttaataaaagtaattacttttattatatgaatagctggaagtgacatcaacaaaatgacaaacggcatagctacattaacagtagccatgccgtctgtatatcgtgcatttcaaaatcggcaagatgatttgctgtttttttgctctaatgccaatccaatcaactgatccgcctgatccgccataaacagcggaatattcagcacatcatcatccaacttcaagttgtccagggagaatcgcacacggagcttgaccttgtccgggaacagctccttaaatttcttcaggctcttgctggtcgtgttggcctcggacttaacctctacagggaaaatgtcattctctcgttggatcaggaaatccacttcgtacggagggttgttctggctccaataccggggaaccacctcaaactgcgtgattaaggtctgaagcacatagttctcggtcagtgcacccttgaactcggtaaacaggcggttgccctctccgaaagccgtgggtgccagctgggccaggcggcggagcagtcccacatccaccagataaatcttaaaggcagacagatcatcgtaagcagccaccggcaggccgggagcagtactgcggtaaaccttatgcaccagtcttgcatccaccagccactgcaaagcatcctcgtattctcgggctcttgcgccttccttgacaaccttgtagataaacttcttattctcccttgccagctgggaaggtatggacttccagatcattgagatcttcgggaactcgctgatgttggggtgcttggcaaagtctcgctcataggcaccgataatcccagacaaggcttcctgcatggcggagacatcccgtgcctccgtccacatgagcacaggttccggcatgccaccggtaacatagtacatcttcaatttctcatagagcggattgaaaaaggcatcgtgaatcggctcaatggtatccacgctctccaggtatttggcgagattttcatcgccgttggcaagcaggaattctgtgaaggtcatgggatcaatctgcataaagttgaccttacccaccgggaaagaagacggttttgccagggcaatgcccagcagagatccggcgcaggcaatgtgatactgcggggcattctcgcagaaatacttcatggaattgataaccttagggcaatcctgtacctcgtcaaaaatgataagcgtcttttccggcacaatcttctgaccgctggccagcatcagattctgtaaaatccgatccacgtcctttgtggtctcaaaaaactgcttgtattcttcgttttcgtcaaagttaaaataggcagtattttcataataacgtctgccgaattctttgagaacccaagtcttgcccacttgacgcacgccctttaagatcagcggtttgcggtagggtgaatttttccaatccagcagcttattcaaaatcaatcgttccatagatacactccttcacacttttattggagttccggtgccttgtaatcacatttttattatatgccgcttccgccgaaattacaaccatcatcacaaaatttttatgttatttggtggtctctatcacacttttatttggcttcctaccttcaaattatataaagcaccaccggcatatgccggtggtgccatcctcatttatgcatcaattcttcctttaatctgattccaaccttcaatccttctacgaaccctgctttctcgtggtcacggcagagagtgcagaccggatagatcacccgatccatttctctcagtgtcattccattcatggcctgatacagagcgttgaaatcttcctcgatttggtcatcgtccatcctgtttacctcgctataggcttcgtagagaagtgtcagaatggattccccatctccgacgttcggctcatgggacaagacgtattctttcaatgcctggatatatttcgctatcatgcaaagatcacctccgcattgatgatttcttccgcagcattgcggatgttattcatgcgccgcacccaggccatttgatcctgtgctttgagctgttcggtgatgccttgcttttctgccatctgctttaccagaaggtcaagcatctccttggcacggttgtctacttctgcaagatagctgctcagttttccgctggtctgcaaatcggtatagagagccgggcgatgctccttgatgtaccgcagatgctttctgccccacattccgatgggctgggtgtacacttcttccagcaccagacaagggatgtaatagtcgccttggagttcgtaccataggccattattcctgtcaaagatgcatttttccatgatgtgtgtcctccgtatgcgtatttgattttgaggtgaatcaaataacagcacgctgatttacttctcacttgttgccctgtgaagccctgggcagctgtacacaaggaactcgtaggatgcaaaatcagtttttcgtggtcaacccacgagcagaaaattataatcaaatacatctaaaaaatgctgatttgcgctgaaaatcaagcagaaaacgaagaaatttcctgacattcagcatggggcatttggggctgtcgaagttctccaagcgttaaaaaagttctcttttccccggaaaacttcggttttccggggtttttctttacctattgttcggatacttaaatctgtggggtctgatttttgaggaaatcgaccacaatatgttgcggtctggcgaaaattaaccactatttttgaggtgggaaaagtggtgtaaagcccgtttgaggtgggaaaagtggtgtgaaaaaacgcatcataaatggcgtaaaaaatgggcaatccctgtgtgaatataaagttgcccatatcgttgagatgctgcgtggaaagaaagaaccaaccattatccataccgaccaaggctctgtgtattcctcaaaagcgtacaacgaactgattcaggacagcaaccttgtccgctccatggcgcaggcaggtaaaccaacggataatcctgtcaatgaggctctaaacggttggataaaaaaagaactattcatcgattttcgattagaagaatgccgtacgagagatgccgtgaaagatgtcctgtgccgctatgttgacttttataaccggcagcgtccctgctttgcaatcggctatgacacaccggataactactgcaagcgtttctatcgaggtgagcttgaaaagaaggataccttttcaaagcgcatcctgaccgaagaacccaaattcgtgcaaaagcggaaagatacagaaaaataaccctgtgctgtgtctacttttgattttgtcgctctactctatccaaaactactatcccttgcaaacaagggccttacaaggcattgaatcgttgtgtccacttttgaaaaaggatttcagcaaaaattgttgtccgtgtccacttttgaaaaagcaacttccgcaaaaatgttcttcatctctacttttgaaaaagtaaactaaaaataaatatttgtcgtgtctacttttcttgactactacattgcacgcccttaaacctgcgggttatcgaaaattacagtcttcataaacatgagtattgtcagaaaatgttgctatattaaacttgcggattatcgggagatgtgctattctatctgtgaggtgatgcacatgcttttcaaacgaaagatttataacaagtttctcgcatggaaacaggaggctaacgggcagaaagctctgttggtggaaggtgctcgtcgaattggaaaatccaccgtagtcgaggaattcgccaaaaacgaatataaaagctatatcctcattgactttgcaaaggcccctgaaaatgtcaagagctattttcaactgcatttgaatgatctcgacacattctatatgctactgtctgttcaatacggcgtacagctctacccgcgcgaaagtgcgattatctttgatgaggttcagcttttccccaaagcacgcgaagcgatcaagtatttggtggcagatggtcggtatgatttccttgaaaccggttctttgatctcaatcgaagaaaatgtaaaggatattgtgattccttcagaagaacggcatctcaagatgtacccgctggattttgaggaattctgctgggcacttaacgaagcgccgctgatcccatatatcagagattgtttcgagaagagagtccctctggagcgaagtatgcacaataaggccatgcttttgttcaagcaatacctgctggtgggcggtatgcccatgagcattgttgcttttcttgaaggccaaaaagactttggaaaatcggatgttgaaaagcgggatattctggagctttaccgcaatgacatcatgaaaatcaaagcacaatatcgctccaaggttttggctattttcgaccagatccccggtttgctgtccagacatgaaaaacgagttgtcttcaacaaaatcgtagaaggctctatggcagatcaatatgaagaaaccttcttctggctgtcgaactccatgattgcaaacgagtgtaggcgcgtcagtgatccgaatgttggcctgtctctcacagagtcggatacctacatcaaatgctatttaggtgatactggattgcttgtcagccatgcatttgacgaaaacgaacttctggaggacgaggtttacaagcagatctttgcaggaaagctcggactgaatgagggaatgctttacgagaatgtgattgcacagatgttggtttctaatggacaccgcctgttcttctatacccagtacaatgcggaaaagcgcagaaatgacattgagatcgactttattatcgccaataacagtaagacgaagtacaagatgtatcccatcgaagtgaagtccagcgctaagtattcctttgaatctctaaagcgcttcaaggaaaaatacaagagcaggattggcggatgctatattattcacccgcgcaatctcattgagaaagatgatatcctttgtgtcccgccctatatgacaatatgcctgtaatcgaaagtatctccaatgcagtatcgcattggagatgcttttttatgaaagactgctcagttcctcgaacaactcaggcagcgccctggggcgatactgccggtgttgcgttccgctgatacgcggtgatggatcgtggcgcagaaactcatcgggattggcatctaaaacgaagtcaatccaagcgacggcgtttttgcaattacgacgccgtatccgtgcttcacggaggcgctggtagatatcaaagccctgatcgcaggccaaatcatagaactctgccgcgtgcagaagatcctctatctccatttcggcgtggatctgctgttcctccagtttaggtcgtgccttttgaatgtcctgaatgaatccacgaaatgctccgatggattccagatagtaacccggttcaatcaggtccagatctcgtctgggctcagaaagcacttcaggatgttgcgaggcgatggaccgcatttcaactcccgcatcttcaggggctacatagtatccgagatttttcatcgcctttggcaggctgcgcaggaattcgtctgcattgaagcgctcatcgaacacctttgcgcgacgcttatccacgatgggggttgcacatccccgcctgtcgctgcggacgaagaatttgtcgtttgtaataacccatggcatacatagattcctccttaaaatgtgattatggatagtgtttctgcggaagtaaatggcccgctgactgcatccgttgctgtagataacctttatgtaggcggtggctttggcggtggtactctgccggatccgatcaccgtaactttcggcgaaaacgcagcattgaatgcagaaaatacaagcagcagcggcggcatcaatattggcggtctgattggttacaattccgtcggcagtcttgatctgagaggcagtaagctggttaataaggcagacagcgcgctcactatctctgcaaaggctattgcttctatccacgctggcggggctgggcaggtttcagcacagacgcaacagcagcatctgataagtggctttacgcggatgagactaccgttatggagggcgaattcgctgtcaagcgaacagttcgagcggtgtcgtttacgaaggcggtattgccggcagaaccagtgtgtcgtattctgtttcaatcaaaaattatacgaacaagaccgaactgaacggtacgatcatcggcggcctggttggcgaaattcaaaattccggcggcaacaagcagattattctggaaaactgcctgaacctcgccaagctaacaactaccagctatgttggcggtctggtcggtaacatgaatgctacgcaggcaacaatcaggaattgtgctaacggcggtgaactgactggcacaggtaattacgcggctggcggattggtaacacacaccactactacggccgtaacctgtgaaaactcgctttacctcaagacggataaggtgactaagggcttgggggatcaggctgattcggctggcgttattactctggatacggccaaggtcaccaacggcacattctccactccgattgcggatttcctctccgcaattgctcccgcggcgctgactgtcagcggcaacgccaaactggacgacacgagcctgacttacactgaggctggtgagcaggagatcatcttctactggaacagcacagagctgtaccgtgagacggttactgtgactgcgaaggatatgctgaccgtttccggcacctatacttaataatggtaaagagcagacggtaagttatgaggtcaaggacggcagcaagacgctgacggtcggtaaggactacaccgtttccggcaataccgaaaagaatgcgggtacctgcaccgtgaccgtcaccggtcagggcaactatacggacgaagtgagcaaggaatggcgcatcgcgcccgcagggctgacgatcaagagtgttacgcttgaaagccgcgcctacgatggggagaaagctgtgaaggtcacgtccgtgacgttcgatggccttcagaatggtgagaacctgacggactacactgtgaccggtatgatggctgatgccgacgctggcacggacaagaccgtcaccgtcgatgtgacccttaaggataccgtgaagaactacacgctggcaaatggcgaattcaaggacggtaagatcacgatcgataaggcgacatatacaggtgcaaaggaaagtgaaaaggataccaagtatggcgacactgccagcgttgatctttcttctctgatccctgataacgccggtaaggtgacgcttggaactccagcagccaacaatatgattttcgatgaagcccgaattagcggtaaggagctgacctacaagctcaaggccggtacggctgtggtcacgatcaccgcggcggaaacggacacgtatgccaagggcactgcgacggtcaccgtgaccgtcgcccaccgcgtgctgacgatcacggcggaggacaagaccgcctatgtcggcgcgcagcagcctgagctgacctacaaggtcgacggtctgctggaggcgggcaaggagatgctgagcgatgtcacgctgcgcgtcagtgccccggagggtgttgtcccgatgaacagggccggtacctacgacatcgtcgttgcttctgcgacgtacgatacgggtaaatatgagcttacgaccgaaaacggcacgctgacggtgcgcgcacgccacagcagcgggacgaccaccggctcaaccggcggcgtgagcgtcgaccgtccggcaaacggcacggtcacggtctcccctgctgatccggtcaagggctccacagtgaccatcactgtcaccccggataagggtcagacgctcaaggacctcgaggtcctcgacaagagcggcaactccctgccgctgacggaccttggcaacggcaagtttagcttcgtgatgcccgagggcaaggtcacggtcaaggcagaattcggcgaagcggaggcgttcgtcaatccgtataacgacgtcaagccgggtgactggtactacagcgccgtcaaatatgtgaccgtgaacggcctgatgaatggcaccggcaagggctttgagccgaaccttgcgacctcgcgtgcgatgatctggaccattctcgcccgcatgagcggcgcggacactgcgtccgacggcgaatggtacgcggcggcgcagcagtggacagtcgcaaacggtgtgtctgacggcacgatgccgaacggcacgatcacccgcgagcagctcgcggcgatgctgtatcgctacgccgtcagcaagggcatggtcaaggctcccgcaaccgccgatttgagcgcgtttgccgatgcgggaagtgtcagcagttacgcagtcgaggcgatgcagtgggcggtctctaccggcctaatgaatggcatggacggcaagctggccccgcagggcagcgccacccgcgcgcaggtcgccacgatgctgatgcgctttgcggaactgggctgaaccagccaaaatgagtaagggctatcgtcctgcgataagaaacaagaaggacgcattcaaagaatgcgtccttcttctgacaaaatagaaagggaaaggccgtcagcctttcccttttttgctttaacggcaatatttttcaatataagcgttctggcacttgatgatgatcttgatggcttcctcgcggccgaggacgtcgctgacgacggtctccttgccctccaggcttttgtagacgcggaagaagtggcggatttcgcttgccacatggttcggcagctccgagatgtcctgataggtgttgtaggtcggatcctggaagggaatggcaatgatcttttcatcgagactgccgctgtcctccatcgaaataacgccgatggggtagcactccacgaggctcagcgggcggatgcattcagagcagagcaccagaacgtccagcgggtcgccgtcgtccgcccaggtgcgggggatgaagccgtagttggcgggatagtgagtcgaggtgtagagaattcggtcgagacgcagcgcgccggtttctttatccatctcgtacttgtttttcgagcccttctcgatctcgatgaccgcgaaaaagtcctcggggcgcacgcgcgccggggcaatatcatgccaaagattcataatagttctcccttcgtgagaaatggtattgagaaaacgcgcagaagtacgcttctgcgcgctttcgctgacgaaaattatttgctcagtgcctcgtcgatgctcttcgcgccgagcttgccagcgcccatggcgaggatgacggtggcagcgcccgtgacggcgtcgccgccggcgtagacgttctgatgagaggtgagaccggcctcgttcacgacgatgccgcccttgcggttgacctcaaggcccggggtggtgttcttgatgagcgggttcggcgtggtgccgagcgacatgatgacgcagtcgaccggcagatcgtgttcgctgccgaccttttcgatcgggcggcggcggccggaggcgtcaggctcgcccagctccatctccacgcaggtcatggaggagacatagcccttctcatcgccgttgatcttgacggggttattgagcgtcttgaagacgatgccctcttcgatggcatgctcgacctcctcgtgacgggcggggagctcttccatgccgcggcggtagacgacgtacacgtccgcgcccaggcgcttggagcagcgcgcggcatccatcgcaacgttgccgccgccgacgacggcgactttcttgccctgaagcggcatgatgggcgtgtcggagccgtccttataagccttcatcaggttgatacgggtcaggaactcgttggcggagtaaacgccgcagaggttctcgccggggatgtgcatgaacatcggaagacccgcgccgctgccgatgaacacagcctcgaagccgtactcgctcatcagctcgtcgatggagacgacgcggccgatgaccatgttcgtctcgaccttgacaccgagggccttcagaccgtcgacttccttctgcacgatggccttcggcagacggaactcggggataccgtagaccagcacgccgccggcaaggtggagcgcttcaaaaacggtgacgtcgtagcccttcttggcaaggtcgcctgcgcaggtgaggccgctggggccggagccgatgacggcgaccttgtggccgttggagacgggcttggcgggcgcttcctgcacgtttgcgttgtgccagtcggcgacaaaacgctcgaggcggccgatgccgaccggctcacccttgatgccgcggatgcacttcgattcgcactgcgtctcctgcgggcagacgcggccgcagacggcggggagggaagaggtctcgtgaatgacctgataggcgccctcatagtccttttcggtgatcttcttgatgaattcggggatcttgacctgcaccgggcagccggagacgcagggatggttcttgcagtttaagcagcgggctgcttcgtcgagcgcctgctcctcggtatagccgagcgcgacctccagaaagttcttgttgcggacgttgggctcctgcgagggcatttcgttcttcttcagactcatgttaggcatattactgaacctccttgctgaacaggttgcaggtctcttcgtatttgtggcgctcccagtcgaagtacatcttgccgcgcttgagactctcgtcccagtcgaccttgtgaccgtcgaagtccgggccgtcgacgcaggcgaacttcgtctcgccgccgacggtgaggcggcagccgccgcacatgccggtgccgtcgaccatgatcgggctcatggaaacggtggtggggatgccgtagggctcggtggtcttggacacgaatttcatcatgatggcagggccgatggcgaagatctcgtcatactggttgcccgcgtcgatgagctccttgagcgcatcggtgacaagacccttctcgccgtaagagccgtcgtccgtcatcagcttcaaaacgctggacgccgcgcggaacttgtcctcaagaatgacgaggtccttattcttgaagccgacgaccgcgtggacttccgcgccgcagtcgtggaacttcttcaaaacggggtaagcgatggcgcagccgacgccgccgcccacgacgcagaccttcttcttgccttcggtctcggtcgggcggcccagcgggccgacaaagtcctgaatgtactcgccctcggctttatgtctgagcttttcggtggtggcgccgatcgtctgcacgatgatggtgacggtgcccttctcacggtcgaagtcgtggatggtgatggggatgcgttcaccgttttcatcgacgcgcaggatgatgaactggccgggctcggccttctttgccaccatcggcgcctcgatctcgtagagggtcacggtgggcttgagcgcttctttcttcacgatgcgatacatgaatgattctcctttttgttgagattcagtgccgtgccgtccggggagaacggcaggcgggattcctggacgcagcgccgggaatatggaatgatgctatatttatatcatgaaagttttcttgcgtcaatgaatgtcgaaattctgacgatgcaggaaaacttgcatttacgaaaaatacttgcaaaaaactaaagcagcgtcacgctgcggccctcggtgctgatgaggtcctcctcgcgcatcttgcgcatctcgcgcatcatggcgctgcggtcggcgctgatgtagtcggcaagcatgctgagggaaaacggcagggggaacgtccggctgccgtgctcgtcggcgagctgctcgaaaaagcacagcagcttttcgcggatggagcggcaggcgagcacctcgatccggcggctcagatgcagagactttttcgagagcagttggaagaggttcgttacgacctgactgtggcaggcgcaggcgttttcgcagcgctttgtgatttggtcatagcgcatgaagatgacgcggcagtcctcgcggcactcgatgagcgcgctgccgtcgcgaaagccggtgaacgccagctcctcgccaaagacgctgccctcgtccatgctttcaagcacggtgcggttgccgtcggcgtgcaggcgtagaagcgccgcgctgcccgagagcagcacgccgatcatgtcctgctgttgcccgcaggtgaggatagtctgtcctgcgctgaagcgctgctcatacgcgctgaagcagcgcagcatattttcgcacgatgcttcgtccacgcctgtaaacagtgcggaatcgcggcagtccattgctttccctcccgtaaggcctgctgctttaccggtgcagcgcagccgttgacctattgcaatatcatataccagagcggagaaaatgtaaatgacaatttcgtgaaaaaagcggataaaaaaacgccgattccctgtaaaaaagcatccgctttatgagcggatgcttttcttttttactctgcggcggacttgtcctttgccttgcgcgcatagtcgtaaaacacctgcgcgatgggcgacaaaatgctgtttttgtgcttgacgatatagagctggcggcggaagcgcgagtcggggaagggaaaggcgaggagcttgccgaactggacatagtcctgcgcggcgctctgcgcgatgaggccgacgcctaagccctcgctgaccatctgcttgacgctctcggtcgagcggatctcgaccgcggtgcgcagctgggcgatgtcgatgccgagctcatttaagagctccttgcccgcctgatacgtgccgctgcccttttcgcggctgatgaacgtctcttccttgagctgctcgatggggaagggcttgcccgcaaaggcctgatacttttcggtgttcggcgtgatgagcaccatcgggtcgctggcaaaatcctgatagacgcatttgtggctcgccaccatcgtgccgcagaagccgatctctacgctgcgcgtggcgacgagctccacgaccttggggctgtcctccatctggatgttgaaggtgatgtccggatagcgggcgcggaagtcctgcaaaaggtgcggcagatagtactggctcggcaccgtggaggccgcgatggagatcgtacccttcatctcctgagagaagttgcgcagcgcgatggccgcattctcgcgcacttgtaagatctccttggcgtatttgtagaggagcttgcccgcgtcggaggggtaggtctccttcgtggtgcggacgatgagcttgatattcagttttctctccagtgcggagacgtgcgagctgatggtcggctgcgtcaggtgcagcagctccgcggcgcgggaaaagctgcagttttccaccacgtagacgaacgcttcgagctctttgatatccatatcaatgtccatgaagttcccccgtcagaccggcaaaagcgaaatgttttgcgttgatagtgcgttgaatgcttattttttaacagtatacacagtttagcgccgtttgtccagagagggaaacggcattttgcaggattttatgcatttttgcccgtgcgatgcaccgcgcgggcagaaaatgacggcttactgcttgtcctgcgccagcgcctcgcccagcgcgatggcgagctgatcggggcaggaggtattcttgaagccgcagcggatgccgcgcatgcgcgcgatggcatcctcggccttcatgccttcgaccaggcgcgaaatgccctggaggttgccgttacagccgccgatgacctccacgctcttgatggtgtggtcatcgttcagctcaatgtgcatttccttggagcaaacgcccttggtgcggtagttataggtcatttctatctctccttttctgatagtccgcaccgatcatagcacattcaccctgcgttcgcaagggatgtgccgaaaaaggaaagaaaaagaagatgcggcaattcggggtggtattccgcgaacaagcgtgctataattatcctgttagaatattgccattacagaacaaaacgcaaaaggagttgttttttatgtcagttttgaccgccgttgttctcggccttgtgcaggggatcgcggaatttttaccgatctcgtcctccggacatctcgccatcgcggagcacctgctgaacatgcagggcgcgagcaacgtgcccgactttttcgacgtgctgctccacctcggcacgctcgtggcggtgtttgccgcttactgggatgatatccgcgatatgatcgtggagtttttcaccggcatcggcgaccttgcccatcatcgcacgccgaaccccgtgccgcctgcgcgccgccttattctgctcattattgtgggcacgctgccgcttttcgtcatggtgccgtttcgccgttttttcacggagctgagtgataatatgtactttatcggcggcgcactgatcgtcacgggcatcctgctctttgcgagcgaccgcgtgcgccatggacgcaagaccgaaaagaccgccacaatgctcgacgcgctgctcgttggtatcggtcaggccatcgcgctgtgcccaggcatttcccgctccggcatgacgatcacggcgggctgcttcacgggctttgagcgcaagttcgctgtgcgctttgcatttctgctctccatccccgcggtgttgggggcgaacatcctgacgctcaaggacgcgttcgaagcgggcatcgacttctccagcgtgcccgtgtacctcgtcggtgtcgtcgtcgcggcggtgtcgggctatgcgagcatccgcctgctgcgctatgttgccgacaagggccgtttcggcgcgtttgcctattactgctgggccgccggcgtgctgacgctggtgctcacgatcctgcactaatttttgattctgaggtgaatcatggcacaacagaagaaaaaaaccaccacaacgaaaaagaaaacgacgggctcaacacgctcctcgtcttccggcaagcgcacggcgaagaagaatcaaaagcgccccatccgccgcgaggtcgcgggcgcgatcctgctggtgctggcgctgtgcctgggctttagctatttccagtcgggggcgtggctgctcgatcagccggcgaagctgtgccggtcgctctttggctggggctattacctcgtcgcgcccgcgctgctgctggggagctatatcctgctcttccaccgtgggcggaacgtcgcgtcctgccttgtcggtacggcactgctgccggttgtgttcggcgcgatcatgcacattgccctctgcaaggaggagtatgtcaacatggatggcatcttgaagcttctgtggacgagcggcaacgcgctcgagtccggcggcgcggtgtccgcgtcgcttgcgatcatgctggtgctgctggtgaaaaaggtgctggcgatggtcctgctcgttgtgctgttcgtcgcgtttttgatgatggcgttccgcttgacgcctgccgccgtgatcgaggccgtgcgctcgcacgagcgcgtgccctatgagccagtggaggaagaggaccttccgccgcagcgcacccatgtgccgcgccgcagtgcgccggtccatacgccggacgccgccatcgacattccgctcgacggcgaggagcgcgtcatcaggaaaaatcccacgggcggcttcttccgcaagaagtccgataatatcaagagccccgacgagctgttagcgggcggaagtgccgcggagacaaaaatcgctgcacccgtttcgcctgccgccgcgccgtccgcacccgttaagcctgtgacggtggaggccgacgacttcgacctgccgccgtttgatacagcgccgagcgcgcccgcgccggtcgtcccgacgcccgctcccattacgcacacaccgtttgccgcacccgcgccgagcgtgcagagcacgcccgtcaccgcagcaaccgtggcagccgccgcggctcccgccgtgctgaccgacaagcaggaggataagctccgccgcgccgaggtcgatgccgcgcgcgaggaggtcacgcgcgagatcgagggcagcgacgcgcagccccagccctccgcgtatcagtacccgcccatcacgctcttaaaagagggcagcgtgacgaacgccgccgaggcgggcgcggagctgcgcaacaactcccgccgcttggcgcagacgctcacgagcttcggcgtggatgcccagccgggcgatgtggtgcgcggcccgtcggtcacgcgctatgagttcacgctcagtcagggcgtgaagctctcgaagatcacaaatttgcaggacgatatcgcccttgcgctgggcgcgagcggcgtgcgcatcgcgcccatccccgacaagatctccgtcgtgggtgtcgaggtgccgaacaagctcgtttcgcccgtcagcatccgcacggtgctcgaatccacggagttcaccacccatccttccaccacggccttcgccgtcggcaaggacatcagcggcaagaacatcgtcgggaatatctcgaagcttccgcacgtgctcatcgccggtacgacaggctccggtaagtccgtgtgcacgaactcgctgatcgtctcgatgctctataagtcaacgcccgaagaggtgcgctttatcatggtcgacccgaagatggtcgagcttgcgccctacaacggcatcccgcatctgctcatccccgtcgtcaccgacccgaaaaaggctgcgggcgcactgcaatgggccgtgtacgagatgatgaagcgctacaaaatgttctccgagcacaacgtcaaggaccttgcctcctacaataaggtggcggagacggacgaaacgctcaaaaagctgccgagcgtcgtcgttgtcatcgacgagctggccgacttgatgctcgttgcggcgaaggaggtcgaagagtcgatctgccgcgtggcacagatgggccgcgccgcgggtatgcacctggtcatcgcgacgcagcgtccgtccgcggacgtcatcacgggcctgatgaaggccaacatcccgagccgcatcgcgttcgcggtcgcctccgcgatggaatcgcgcattatcctcgacaccgcgggcgcggaaaagctcgtgggccgcggcgatatgctctatgccccgctgggcgaaggcaagcccaagcgcgtgcagggctgcttcatctcgagcgaggagatcgagcgcgtggtcaacttcgtcaaggaaaacggcgagacggactacgacgaatccgtcatcgacaagatcaacgctgccgtcgccgaaaaggagaaaggcagcggcaagggcggcagcaatgccgcgcctgatcagaacgccgccgacgagggcgacgagctgctccctgccgcgatcgacgtggtcatggagaccggtcaggcgtccgtctcgatgctccagcgcagactgaaactcggctattcgcgcgcagcgcgcatcgtcgacgagatggagacgcgcggcatcgtgggcccgtttgagggttcgaagccccgccagctgctcatcacgaaagagcagtggcaggagctcaagatgaagggcgcctacggcgcgacgccgccggaagcggaagagcttccgccgccggacgaggaaaactgaacaaagcgaaagcaccgcagatgaaattcatctgcggtgtttttttgcgcgtgtttggttcctcgcgcacgggaggcgcatagactggcgaggaagaagaaatgggggaggagatcgacatggcctattccgacagggagctgctcgcgcgccttatcgagtgcgaggcgggcggcgagggcgaaaacggcatgaaggcggtggcgggcgtggtgatgaaccgcgtgcgcgccccaggcggggaatacgcgcgcgtggggcagggcagcatccgcaggatcatcttccagccggggcagttcgtctgcgcgagcgaggtggagcgcggcagctacaacccgcagaatatctacaatatgcgcccgacggatattcactatgagatcgccgactgggccatcgcgggcaaccggctttcgggtcttggcgaggcgatgtggttttttaaccccttttcgccgtcctgccgggcgaactttccctctggcgtgggggtattcgtcatgcgcatcggcgaccactgcttttatgcccccaccgccgcgtattacgacacctgagaaaagcaaatcagcagcaacgggaaagggagaggacgtttttatgatccagatgggaaaaagcatgccatgcctttatgaggagatggccgctgtgcccgccgcggcgggcacgcagcagcaaaagggtagcgagatgagcctcggctatgaggaaatgctgacaggaccgacgggcgcggcggtgatcgtgccggcgggcggcgcgaacggacacttccgcccctcgcccgacaagatcgaagaggtgcagaccgtcgacaagatggaatacaattcgtggaagggaatgcttgcgcgcaacatcggtcggccggtcatcgtgagctttctcgtcggctcgcagaatacggttgtggccactgggacgctgaaggaggtcggcagcgactatatcacgatctatcatccgggtcgcagcgcctacatcacagccgacctctactccgtccgctttgtggagtttccgcagggaaacaatgtggtcacgctaaactaaaaagggacgctttcgcgtccctttatttttgcttttgcgttcgcagacgcaaagaattttgatcgtcgatcgccgcgaccggcgcgtggcgatcgacacctctcgctccgcgcgtgtcgcagccgccagcggcggcaaggcacaaagcggagtgtggcctttctcaaaaaagcggctttaccgcttttttgaagtacttagaatcttctcctccgcccgcggtagccgccgtgtgccgcgccgcggcggcggtggccgtagcgacggcggcgggagaacatcgttacatagacgacgagcgcgacgatcagcagtacgaccacgatcaacagaatgcggacgagcggctttgcgaaaaagtcagacaccctgcgctgcgccgtcaggaaccacgaggccgacacatcgttcagcgctaagaggtccgtctcggcgtagaccttaccattgtaggagagcgtcagcttgccgagcacgtcgcccgcggaaacgggcgcgtcgaccgtgtcgttcgtgagcgtcacggtgcgctcaagcatgtcgggctcgacattgtcgggcagcaggcaggcgatatcctccgccgcgtgggtcgaaacgtagctcgcctcgctcgaaagcgcgacgggcacctcctgcacaaggtcggaggaggagagaatgtcgcggaggacaaagttgtcaaagccccagtcgaacatgcgcgacgtttcggagaagctgcgcgtctggatggtcacaccgtcctcgagcgtcacgcgctccgcgcccagcaccacgctgatcatgtggcggctgccgcgcagggcagacgaaatgagacagtagcccgcctcgggcgtggagccggtcttgatgccctgcgcgtcgcggtacacatagccgcgggcgcgccagttggaaataagaaagttcgtcgaatgcagctcacgcggcttgtcggtcatgttcgtggtgggcacggtgtagctcttggagttgcagatctccatgaatttgtcgtgcttcatcgcctcgcgcgtgatgaggtagaggtcccacgcggtcgtgtagtgctgggaattgtgaaggcccgtggcgttggcgaaatgcgtgtgttcgcagccgagctccgtcgcgcgctcgttcatgcgcgcgacaaaggcgtcgaccgagccgtagagcgtttcgcccaaaatgttgcacgcctcgttcgccgagacgatgagcatgcagttgagcagctgctcgaccgtcatcgtctcgccggggacgatgttcgccgtgctgccgtcgctggagagcccctcgaacgccgattccgtcgcagtgacggagtcggtcagcgcgatcttgccctcgtcgatggcttcaaacaccagcagcgcgaccatcacctttgtgagcgacgcggggaagttctcctgatgggcgtttttctcgtagagaatttcgcccgtgttagcctcgatgagaagaccggccttcgcgtcgagcgtgaagtcctcataggcgtcggcgctcgtcagtgaaaagagcgggagcaggagcgcaaaggataaaaaaagtgaaaaccagcggcgttttttcatggaaatatacctcgttgtatgatacaatcaaatatagaatacagtgaagaggagcgcgccgttcggcacgcttcgacatcagtatagcaaaaaaggcaggcgagcgcaaccgtggaaaaggaagaaaagaaaaccaaagtcagcggcgtctaccttgtgctcgccgcgctgacggtgctgttcgccgtttcgctcgtttttctgcacaaaacggcctacgagggcgcctcgcacgggaattacaccgtgacgacgcaggacaagaccgacgagatcaccgcgcccacgcgcgttgtgacgcttgtgaacgtcaacaccgcgacggcggaggagcttgaaacgctgacgggcatcggcccgtcgctcgcgcaggcgatcatcgactaccgcgcagagcacggcgattttacggcggcggaggaccttttgaacgtcaagggcatcggagaggcgaagctcgagggcttccgcgcggagatcacattcacggaggaggatggcaatgaaaattctggtggttgacgacgagcagcttctcgtcaagggcatgaaattcaatctggaaaacgagggctacacggtcgagaccgcctacgacggcgcgaccgccatcgacatggcgaaaagcggcgggtttgacctcatcatcctcgatctgatgatgccgcaggtggacgggctgacggcctgcatgcgcatccgcgaattttccaatgtgcccatcatcatgctgaccgcccgcagcgaggacgccgacaagatcatcggccttgagtccggcgcggatgactatatcacaaagccgttcaacatcttagagctcaaagcgcgcatccgcgcgctgctgcgccgcgcaaacgccgcaccgcagcaaaagcagcctgaaacgctcctgttgaccgcgggcggcatcacgctcgcccccgagcagcgcgtcgccgtcaaaaacggcgagatcgtcgagctcacggccaaggagtacgacctcatcgagcttcttgtcaagaatccgcgccgcgtttactcgcgcgaaaatctgatggacctcgtctggggctacacctacgcaggcgactaccgcacagtggatgtgcacatccggcggcttcgcgaaaagctcgaggaaaaccccgccgcgccgcagcacatcctgaccaaatggggcgtggggtactacttgaaggactgattttccactaaaagaaagagaaggggggcagcgccgtgcagatgcatgcgagcctgcagcgaaaattcagcttcagctatatcgccatcattctggcggtgctgatcctgctgaacacgtatccgctcatcacgtcggaaaacctgacgttccgctctaagcagagctcgctgcagggcagcgtctccgtgatggtgacggcgctttcgggccttgaggagctgagcgaggaaaacgtcgcgggcgcgatgacgctcgtggaggagacgggcatctcccgcgtgctcgtgacggacgcctcgggccgcgtgctgtatgacacgcgcgagaccgacggcgcgatcggccgctacgccttttatacagagcttgtgcaggcgcttcgcggggaggacgttttctacaccgaattttcggacaaggcgttcaaaagccgcgcggcctcgccggtcatctaccacagccagaccatcggcgcggtctacgcctacgaatacgacaccgagcaagcggagctgctgttgtccttgcagcgaaatcttctgaccatttccgcggtcgtgctggtgttcgccggcgggatcagcgtgctcttatcccgcgtgctgacgcggcgcttcggcgtactgaccgacgccatccgcaagatgcgcgagggctcgtacagccaccgcgccgaggtcggcgggcacgacgagatcagcgagctcgccgccgagttcaacgacatggctgaccggttgcaaacgacggaggacgcgcgccgccgcttcgtgtcggatgcgagccatgagctcaaaacgccgctggccggtatcaggcttctctccgactccattttgcagacggagaacatggacgcgcagaccgtgcgcgaattcgtcggcgatatcgagcaggagtccgagcgcctggcgcgcatcacggaaaatctgctgcgattgacgcgcctggacagcggcatgctgcccgaggcgcagcgcgtcgacctctcgtccgtgatggcgcgcgtggtgcgcatgctgcgccttgtggccgaggaaaagcaggtcgacctctcatatgaaattcgccgcgagggacagacccttgcgagcgaggatgaaattcacgaaatcatctacaacctgacggaaaacgccatcaagtataaccgccccggcggctttgtgaagctgctgctcgcgggggatgaaaaggactgccttctcaccgtcagcgacaatggcatcggcattccggatggggacatgccccgcattttcgaccgcttctaccgcgtggacaagatgcgctcgcgcgccgcgggcggtacaggccttggcctttccatcgccgccgacacggcgcgccgccgcggcggcagcatcgaggtccgcgcccgtgagggcggcggcacggtgtttaccgtgcgcctgccgcgctgcaaagagggaggggatgagacatgagaagacatctttccctgactgcggcattagtcctcctgctttcgcttctctgcgcctgcgcggcccagcacgcgcaggagatggacgagaacggctacgagctctattttctcagcgatcccaactccgcgggcggcggcgacgccatccgcgcgcaggaaaagcgtctgacgctcgacggcgcgatggagaccgaagactgtgtccgcgcgctgctggaggcgctgctcgcagggcccgacgagccgtcgctctcttcgcccatcccggagggaacggcgctcaagtcgctcaaggtgtcgggccgccgcgcgcagatcgacttgagcgcacagtatgcgcgcctgacgggcatcgacctgtcgctcgctgactactgcatcacgctgacgctgacgcagctgccgaatgtgaacgctgtgagcatcacggcggacgggcgcgagctaccgtaccgcgagacgcaagtgctgctctcggcggatacactgctttcctcgcgtgagagtggcctgcggccgatcaccgtgtcgctttatttcctcgacagcaagacgggcgagctgcgcgccgagcagcagacgctcgcgctctacgagggccagacgcgcgtgaacgcgctgcttgaagcgctcgcgcaggggccggaggacgattcgctcgtctcgctcctgccggaggactttgcggtcatctcctctcgcatcgaaaacggcgtgtgctatctgaatctcccggctaacgtctcactgccggagaacgaggcggagcgcgatttgatgctgagcgcgctcgagcagtccattttgtcgctcggcggcgtggacgaggtgcagtttttgatcgaaggctcggccgagcccgacggctaccggtaaaaaaggccctccgcagaaatgcggagggccttatcatatcttgcgctattttacgctcactcgcgcgcgagcatcgccgcgccgatcacgcccgcacggtagccgagtgtgcagagctcgatgcgcgtgtgcgagacggcatagcgcgagccgaacgaacgctcgcgcaccctttcgcgcagcggcaggagcagcgcgtcgccctgatttgctacgccgcccgagagggccagcacttcggggaagaaaatgttgacaagatttgtgagcccgcaggccagatgctcgatgtagtcctccacgacctgcgcgcccgcctcgtcgccgcgctccttggcgagaaacgctgtgcggccgtcgacaccgccctgctccgcggcaatcgcgtgcagcaggctctcggggtgcgcggccatggtgcgcttcgtgtcgcgaatcagcgccgtggcggaggagtaggcctcgaagcagccgcggctgccgcaggtgcactcttcgccgttttccgcgatgaccatgtggccgatctcgctcgccgcgcccgtgtagcctgtcaggagcttgccgccgagcaccacgccgccgccgacgcccgtgccgagcgtgacgacgatagtgctctccgcgccgcggccgcagccgaacagcgcctcgcccagcgccgcggcgtttgcgtcgttgccgaggtggatgggaagcgcagtgtgcgcgcgcagcgcgcttcgcaggtcgaagttcacaaaattcaggttcgccgcaaagcgcacgatgccgctcgcgtcgtccaccgtgccggggcagccgacccccacgccgccgacggtgtcctcgccgatagagagctgcgcgatgacctgaccgatgcgccccgcgaccgcctcggggccgagatcgacgcgcgtcgggatagaatgctcctttaagatatcgccctctgcgctcacgagtgcgcccttgatgttcgtgccgccgaggtcgatgccgatatagttcataaaaacgcccctcccgggtgaaatgtgccctcattgtatgccgcggcgacagaaaatgcaagagctcgcacggggaaaaagtttcttaaaaaaatcataagggtgaaactttttgagagatttctcgtctaagagaatgtacggaacgaaaaaagctccgcataatcaagatggaaagaagacgatgaaaggagaaataaaatgaaccgctggggaccgatgagcgcccttgcgctcgccgccgtgctgctgctcgcgggctgcggaggcgactgcgggcttgacgatgacgacagcgccgacgagctgcagatcacctacgaagacatctgtgagaggaataagatctctgcgctgctcgagcggcacaaggtggtgactattgtacgggagagcacagacagcagcaacggcggtcaggacgtcaagagcactgaccagtacacgcgcgacgaagaaggccggctacaaagctggagccacggctggtattatgatgagtacggcgcagacgatatttatagcgtgaatgtctgcctggatgaagtgccggacggtatgtgcattatcgctggaacaaatgatgacggcagcgctcgaattgccagtgtgatcgcctgcggaacggatgagtggtacgaagaaagtaccgcgcgggaaccgtttttgcccgtggccggtgacggtatcacggtggaggtcgaagagccgtatgagcaggacggccagctcgtgtttccgatcaaacattatatcaccgacgatgacactgactactcgctgcgatggctctatgtcgatccaacctccgatgacctgatatcgatcaagtcggagcggcacagaaaagacttgcagggaaaagacacctgctttgccacggggagctatacgttcagctatgaccgcccttatgaaccggaggaagacctctacgcgctgatgctgtcggacgatgttcccaagcataaaatcacgctcgtgtgggacccgggcaccgcgcaggagcacgagcagcactttaccgtgccgagcgcagcgtacttttccccagagagtggtaagggcgtcatgctttactacgacgccgccatgacgcaggagtatcaaacccctgagatcgagtggccggacggcgaaagcatgaccgtctatgtgaaaagcgtcgatcaagactgacgggagatgagagaggagagcacaccatgaaaagctggaagagagccgtcaccgttgctttatgcgctgcgagcttacttgcaggctgcggaggcgactgcgggctgagtgatgacgacagtgccgatgagccgcagatcacggtcgagcagttacgggctgcgaacgatcagcgctcgctgctcgaaaagcacgacacggtgaccgtgaccgtgcaggagaatgatcaaaatgacgctgtgacccgtacggcgaagtttcagtacacctgcgttgtggatgaggtgctggcctggtatcattgccagtacaccgaaaacagcaccagcggcaaagccgagctatggggtcaggcgaacggagcgatggatgccgcgcgtatggagagcgacagcactgaggacctgagcctgagcatttaccttgagggaaagtatgagcagtacgttctcgacatgatcccccgatgccctgctttggaagaggacgtggagcagtcggtcgacagctgcagcgagcaggacggtgagctgctgctctccgtcaccgcgcgctatctgtcttccgatggcgattactacacggcgctctaccgcgttgaccctgcgacgaatgaggtgctggaggcgtcagtgaccgactacattaaaaaggaaagcggcgaggtatccaagctgcatacgacgcgctaccgctggagctacgacgagccttatcaagcagaacgcaatgtgatgaacgaggttctgttttcgacggacagcacggaggacgtctgcgatctgacgtacttctatcccgcgccgggctcggagaagggctgggacgccggggagaacggctggagcgtcagcgagatccgcgtggcgcatggcacgcgcatcctcttcctcgacagtgcggatctcgcgctttatgcggacagggagctgaccaagcccatcgacttctacgacggcgtcgacacgagcggcgagagcgcgacggtctacatcgtaccgctggaagaaaaccgttaaaaaagctttagaacgcgggcgcgagcccgcacccaaataaggaggaaaccaaggtgaaaaactggaagaaagcaggcattggcgcgctttgcgtcgtgagcctgctcgcgggctgcggcacgcagggcggcgacacgaacaacaacgataaaaacgccgacgagccgaaggaaatttcgctcgagcaggtgcgcgcggacaacattcccgaaaagctgctcgaagatcacgacacggtgaccgtgagcattcagggcaccgaccaggacagcaaagagacctacacagccaaggtgcagtatacgcgcgatgataagggaaacctgctgctggcctcgcactacagctacaccgccgacagccccgtgggcgaggatgaattcttcgctcaggcctgcctgtcgatcgagggaaacggcgtgtatctcagcaaaatggaaagcgacggccgcctgaatatgaactgctacccgagcggcgagtatgagagctacattcaggcgatgctgcccgcctgcggcgaattgcaggacgacggctcggtcgagaccatcgacgagcagagcgagcaggacggcgcggtggtgatctcgaccaccacgacctacaacgacatgccggactactactttacgaccctctactatgtcgaccccgcgacgggcgagcttcttgccaagtccgtgacagattacagcaaggatgagagcggtgaggcatccgtcctcggcacgacgctctatgattggagctatggcgagtcctatctgccggacaaggagctggcggccgaggccttcaacagcgatgaggtctgcgcgctgacgcttgtctataaccccggcgcggcggacgaggagacgcaggagatctccatcaagcgcggcacttatgtcacgtttgtgagcagcaccggcaatcttctctatgccgacgcggcgctgacgcagcccatcgacgacacgctgcccatcgacacaaatggcgaagagatgacggtctacgtcgtgcccgacgtgccgctgaactaaaacggcatgaacttaaaaaacggcggacttcaaaaaagtccgccgtttttttcaaaaaagatgaaacatttttcgataaattccgtctaaataatacaggaaagaggctcggcgcgagaattaaggaactcttaaataatttgtaaccaaatcgcgcctgattgtaacgacttcttcataagatgagattataatggacccaagattaaaattgaggagaaactgcgatggcaaatgaccagaagcccgtcatttcggtgcgaaagctccgaaaggtgtacatgatggggcaggagcacgtggtcgcactgcacaatattgacctcgacatcccgcggggcgaggtgtgctgcattttcggcacgtccggcagcggcaaatcgacgctgctcaaccagttagcgggactcgaaaagcccacgcgcggcgtggtgcgcatcggcggcgtgccgatctcacagctcaacgagaaccagcttgccgccttccggcagaagcacatcggctttgtttttcagtcctacaacctgctgccggagctgacggcggcggaaaacgtggccatgccgctgatgttcaagggcatcgacccggatgtgcggctgctggaggcgaagaaaatgctctgccgcgtgggactcaaagaccgcatggatcactttcccaaccagatgtccggcggtcagcagcagcgcgtgggcattgcgcgcgcgttcgtcacgcaccccgaggtggtgttcgccgacgagccgaccggcaaccttgacacaaggacgacgaaagaggtcatgcacatgatccgcggctttgccaagcgcttccaccagacgatcgtgctcgtctcccacgatccggagatgacagagtatgccgaccgcatcgtcacactcatcgacggcaggatcgtcagcaacgtagaaaatcaggtcaaggcggagatcgacgccgcaccttacatcgaataacggaggaaatcgaacatgaaacgcatttcaagatccctgctctcgctctgccttgcctttgtgctgtgcgcggcgctgctgccgaatgtgaatgtggcgaatgctgccggtgagggagacggcagcagtggcggagcctttatggtcacaggttacgatgtcagttcgtcgagcatcacaacgggcgacagtgtggatatcacgctttacctttactgcacagcaaacggcaccgacggcaattcaattcgagtgattcgcaatatcgacagcttccagggcgacagcacctgttatgcgtcagcctcgtcgagtggcgatggtacgacctatactgttaagctcagaaaccttacttatacgggtgcgagcgaaaagcagctttcgtttacggtttactataatgatgcatccggtaacggtcactatcagaacgagaaactacagattcgtgagtgcgtgccctacaccgagccgaagccggagcccgagccgacgccggaaacgatccccgagccgcgcgccgttttcaactctgacggtatgtccacggccatcgccgcgggccagacgaagaccgtcaccgtctacatccagaacgccggcacgaccgccatgcgtgaccccatcctgacgctcaaatcctccggctcgcttctcatcatgggcagtcaggactacatgctcgacgatatccgcgcgggccgcgacacggctgtcaccgtgacggtcaaggcgctcgacaagatcgaatcccagatgcagacgattgacgccacgctgtcgttctactatgacaacggcacgcagctcaccggcggcagcgccagcggcagcgtgaacgtcctctccaccgtcaccaaggatacgaaggacgaggagaccattgcgagccccacgcccatcgtcatcctctcgaagtacaactatggcggttcgtccgtcgcggcaggctcgagtacgaacctgagcttctcgttcacgaacaccagcaagaccatcaagatcgaaaacgtcatggtcaccgtcaccggcggacaagacctgatgctcaacggctcgacaaacacgttctactttgaatccgtcgccgcgagcggcagcaagaccgtcaccgtgccgatgaaggccgcgcagctcatcagcgccagcgcgcaggacgtcaagatcgacgtgacctatgaatacgtcgaccagaacgcaagaaagtcgggcaacgccacgctgtcgctgagcgttcctctttaccagcccgaccgctttgaaatgagcgagcctacaagctcctacaccggctacgtcggcgaggagacgagcctgaccatcgactatgtcaacaagggaaagagcgccatcaacaacgttgaggcgaccatctccggcgatatcgacacgccgacggcatatcagcgcgtcggcacgatcgacggcggcaagaacggcaccatcgcttttgccgtgaccccgcagctggagggcgagaatcaggtcaagatcgtcatcacctacgaggattccaacggcaacacgaaagagcgcgtctttgaagcgacggtcgaggccatggcctacgagccggccgaccccggcatggacgatcccggcatgatcgaccccgagccggcaagcaccttcccgtggaagtacgtcatcatcgcggtggttgctgcgcttatcgtccttctcatcgtgctgcgcatccgcaagaagaaggccaagcagaaggccgagcaagcgctgtgggacaagtgggacgaagaggagatcgccgaggagaagcaggaggcagcggaagccgcggcggctgaaagcaaagagactgcggccacgggtgctgaggagcagaaaaaatgagattcgcagacatcctgaaaatgtgctttgacagcctgtcacggcgcaaaggacgcacgatcctgacggtgctgggcgtgttcatcggctgcacgtccatcatcgtgatggtctccatcggcgcgggcatgcaggagtcctacgaccagatgctcaaaaatatgggcgacctctccatcatcgaggtctaccgcggctacaaccagagcaccggcacgcagacggagagcaagcttgacgacaaggcggtcgagagcttccatgagatcgcgggcgtcaaggccgtcatgcccaaggcaagcctcgacgattacaacatttcgtttaaggcgggcatcaacggccgctacacggccaactgggtcaattttgccggcattgactcgagcgcccttgaggacatgggttatgagctggtcgcgggccgctacccagaaagcagcgacgaggtggtcgtgggccagtattttgcctataacttcaccgatacgctcatgcctgacggcagaaattatgtctaccgatacacctgggacgaaaacggcaatatcgacacggaaaacgtccccgacccgtttttcgacccgctcaagacgagcatcaccatggtactcacaccgtatgacgacggtacgggcaccgagcccgcgccttacgaggtcgagctaaaggtcgtcggtgtgctgaaggaggaccagggaaagggctatgagacgagcgacggcgtgatgatggacatcaatgcgctcaaagctcttattcaggacctgaccggcaagaccgacacgaagttcgagtattcaagcatcaacgtcaaggctgagagcctcgacgccgtggcagatgtggagcagtccatcaaggacttgggctacagtacgtattctatgcagagcatgcgcgacgagctcaacaagcagacccgccagatcgagctgatgctcggtggcctcggcgcgatctcgcttctggtcgcggccatcggcatcacgaacacgatgatcatgtccatctccgagcgcacgaaggagatcggcattatgaaggcgctcggctgctatgtgcgcgatatccgcgcgatgttcctcatggaggcgggcagcatcggccttctcggcggcgttttggggcttattttcagcttcatcatctccgtcggcatcaatctcttctccttcggtgcgttcggcggcgggggcgtgtcgtgggaactcatcaagcaggcgctcatcggcggagagaacgtgacgcgcgtttccgtcatcaagccggagctcatcattttcgcgctggtgttctcggtgctggttggccttgtgtccggctatcagccggcgaacaaggcggtcaagatctcggcgctcgaagccatccgaaacgaataagaaaaacgcagtattttgcaagaaggcggcgtcctggaccggacgccgccttcttttgtaaaaagtgcgatattgcaatgtttcaagcgcttgctttgcttgaccgcgctgatgcgatgtgatatcatatatcagtcaaaatatttatgaaaacaggaggggatcgtcttggcaactgtcaaacgcagatccaccgtaccctattacgccgcggcgggaacatgggtcatttatgcgctgctgtttccgctctaccgcgtaccgcatttcctctttgtggcggtcgtgtcgggggtggtgttcttcattatgaacgccgtgtgcggcacggtcgaggtcactgtgcctgacccgccgaaaaaggaggagaccaccgggaatccggagcttgacaagatgattcgggacggcaatcttgccatctccgagatgaagcgtctgaatgattccatcaaggacgcgaagatctctgccgacatcgaccggctcgaggatttgagcgcgaagatcttcgcgcaggtcaaggcagaccccaaaaagctgccgcagatccgcaaatttatggactactacctgcccacgaccctcaagctcttgaacgcctatgaccgtatgggcgcgcagggcgtgagcggcgagaacatcgacgcgaccatgcagcgcgtggagagtatgatgggcacgatcgtcacggcttttgaaaagcagctcgacatgctcttcggcagcgaggcgatggatatttccgccgatatcacggtgcttgagaacatgatgaagcgcgagggcctcagtgaggacgacggtgagctgcatgccgagtccggcacggcgaccgcctcgcaggacgacatcaagctcgagctataaaggagtaagcgatgcgaaagaaagtgatggcgttcaacgccaaggtgaacgcatggatcatgaagcgcctcaagggcgtgtggctcgacccaatcttctgtgcaatctttgccatcatgtgtgtggcaagcattatcggcgcgctgcatctgcacagggatacgctttactattccgcgctgatctgggcgttggccacgctgctgtgcctgcgccgcatccagcgcatcaaaaagcacgaaaaagaacaaactcaaagccaaaatacggaggagaaatgatatgagcgacaacatgatgcccgagctgaccctgaaccccaccgaaacggcacaggaagccgttcctgagctgacgctcacgcccgaagcgcccgccgcgcccgagacggagaaaaaggaagtcgagcccgtcaaggtcgatgagagcatgctcaccgagcaggagaagaaagccgtcgacgattttgcgaaaaagatcgacatcacggatacgaaccttgtgctcaactacggcgtggccgcgcagaagagcgtggcgacgttctctgaaaatgcactgtcctccgtgcgcaacaaggacctgggcgaggtgggcgagacgctctcgaacctcgtcgtcgaggtcaagggcttcggtcaggaggagaagaagggcttcgcgggccttttccacaagcagaaggataagctcgagctgatgcgcgcgcagtacggcaaggccgagacgagcgtgaaccgcattgtgagcgagcttgaaaagcatcaggtcacactgatgaaggacatcgcgatgctcgaccagatgtatgagctgaacctcaagtactataaggagctcacgatgtacatcatcgcgggcaagaagcgccttgccgaagtccgctccggcgagctcgaggagctgcgcaaaaaggcggaggccagcggccttgccgaggatgcgcaggcctataacgactacgcgcaaaagtgcgagcgctttgaaaagaagctgcatgacctggagctcacgcgcatggtctcgctccagatgggcccgcagacgcgactgctgcagaacaacgacacgctgatggtcgaaaagatccagtcctcgctcgtcaataccatccccctctggaagagccagatggtgctcgcgctcggcatggagcacagccgtcaggccacggccgcacagagcgcggtggcgcagacgacgaacgagctgctcaagaagaacgccgacatgctcaagatgggcaccatcgccacggcaaaggaagccgagcgcagcattgtcgatatcgagacgctgcagcacacgaacgagcagctcgtctccacgctcgacgaggtcgtgaacatccagcgcgagggcgcgcagaagcgcaaggaagcggaggtcgagctcggccgcatcgaaggtgagctgaagcagaagctcatggagctgagaagctgagacgctccggataggagaagcatatgaaattctttcaaaaacgcggtgtcgccatcgtcgtgctgattctggcgatcgtcgcatccagtgcgtggggactgcacaagacgcccgccgtctctacgccggagggcggggaaaagctcgatccctcgctttccacggcggcctttacgcagtatgtgcgcgatgatgccggcgttctttccgacaagactgaggaggccgtcggcctctacaacgccaactgggacaagatgtttggcagcatcatggccgtcgtgacggtgcagtcgtcggataatctcgagaatacggcgtatgactatgcggacacgatgcagctcggctcaaatgacgccattcttgtcatcgccaaacagcagcaggactattatctggtcgcaagcggcgatttctatgatctgctcagcggcctttcgcagagctttgttgcctcctgcatggcggataacgtgcagaagggcgattatgacgccgcggtgcgctcgctttgcgccgcgctccatgtggagctgagccagcagtatcagcagagtgaggcggcgctggacgaggcggccaacggtgtgatgttcatcatggtcctcatcatattctttgtcctctggatcatgcttgacggcatgcgttatcgccgctatcgccgccgctacatgatgcccggcatgggcgttccgacggtgatgtatcaccccatcttctgggggcgccgtcccccgcgcggcccgcgcccgccccattcgggcggcccccgtcctccacagggcggccctagaccgccgcgcagcggcggctcctccggcggtaatcgccgcccgccccagcagccgagacggccctcgggcggttccggtaattccttcggcggattcggcagcagcggccgcggaggcggctttggcagcggaaacttcggaggcttcggcggcagcagccgcgggggcggtttcggcggaggcggcagcttcggcggctttggcggcagccgcggcggtggcttcggtggaggtcgcagcggcggatttggcggtggccgcggaggcggcttcggcggaagacgctgaaaagccaaaacccctgacacaaaacgaaaagcacgtctgcttggcaggcgtgctttttcttactttgattgcggcctgaaaggcgatgacagactggctcgcacagcattgtagattttccgaggaatacaatgctgcttatcggatcttctcaagtgcaatagtgggatcgcagaggaaagcctcactccggtactgccccggccaaacgaccacaactttaatatccggattttcttttgcccgttcaaagaaaagagcagaggacccgcggcgcaggtcctctgctcttggtgccggtgaccggactcgaaccggtacgctgtcgccagcggcggattttgagtggttatatcgattctgttttccgcagcaatctgcactccaccgttcccagaaagcgttgatattactggcttttttgactttttcgtgtttttattaagcaaatacggaatgtcttggtgttctctcctgacagctcaaaaaagcggtttggagagaactaggagagaactccggtacaacccattttctcgtgaggaatggtggacataggagagaactcaaacgaattttgaagttttaggagagaactgaatcatactattaggtatcgaacccatctgtcaatggtaatttagacggaggttcgatcatggaaaaaccaaggaagagatatatacaacaattcaagcaataccccgatgtagtgtctgtactaacatttcgtgaaatgttaggaggaataggcgatagctttgctcgaaagttaattcacgaaggacttgtaaaagccatcttcattaaaccgcactactggatcttcaaagagtccattattgactatgtattaagcgaggactacgcggagagaaggctgaaggtgcgggtatgaaaaacaggcagcttagtctttcggatattcaaaaagactatatcagcaaagaagaattttaccaaattgcacatatatgcaaggaaactgcattgtggttgatagaaaccggcagggtatccgcagagaagccgaaacgaaaaggatttggatacaaaattgcaaaggaagaagttgaaaggtatttggctgatcgtcaacagaatccattgtactatctcaagggcaagcgccacaactgtatcccatatactccaccgcagccatattcaagcgaattaggcggcgctattcggttggctgtggagcaggaaatgtcctctctgccggatctgctgacagaaaagcaggtatgcgcgattttgggatatcgcccaaagcagatattagactggaaacattctgggaaattgattgctctgaaatgttttaataaaacatattttcctaaaattccactgatggattttgtttcttcagaagattactacaatttgccgtgtaaaggaaggaaacacatcgaattgctgaggagagttcaaaaatgagcatgaatactatcgcaatcaccaaccaaaaaggcggtgttggcaaaacaactaccgctttgaacctcgcggctgccctcgcagctgaagataaaaaggtcctgctgatcgacaatgacccccagggcaatctcaccgcagccctcggctatacgccgggggaacagaagaatacgctggcaaagctgctgcttgtccaaattgactctccggaggatctggagctccacctcgatcgtgctgtactacataccagcagcggccttgacctgatccctgccaacaagcggttagcggacgctgcagcccgcttgcaggtcatgcagctttcacagtataacgcatctggcatctcagatgacccttgcgagaaggtgctggacaagctgttggcatccctgtgtggactgtatgattacatcatcatcgactgtggactgaagcatgaactattgaccgttaatgctctggctgctgcggattactgcatcattccggtgcaggcgcacttccttgcaagtgaagggattcccgatgttttagaaatggtgcgcaatgtacagaatcgattcaaccccgatttgaagattgcgggcattctcctgactatgtatcagtcccgcccgcagctctgccaaagcgttcgctccagcgtgggcgagatctacggtgacagcattcatgtatttgaccgccccattgagcagacgatcaaggttgcggagtgtccggcaacaggcatgagcattctcgattatgcacctaagaatcctgctgctgactcctatcgctctcttgctcaggaggtgctgcggcttggctaaaaaaagcatggatgacctgttaaagcggcgcatgagcgcagcgcagcaagcatcagagttggaagtaggcaatgaggcttatgaaactatgtttcaagcaaaggcagatgcggcagtaccccgcttttgcgaattgccgatcaacagcctttgcccttttcgcacggcagacattggatttcatccctacccgcccgaaaaactccgcgcattctctcagcagcttgccgagcagggcatctatgagcgcattatcgttcgcccagttccaaatagtgagcagtatgagattcttgccggacacaatcgtactgaagcgtggcggctgaccggacaatcaacaattcctgcggaggttgtggaggccgatgacgcgagagcaatttccattgcggttgccaccaatctcctgcggcggcaggatctcaccatcattgaacggggcaaagcgtatcgagcgttgcttatagagagcaacagaaatgggcaacgaaatgtagcctatccaacctttggcgaaaatcgccaaaggttgaaggaatcttcaggcaactcaacttctggcgattctcgccaaaagttagatggagatagcgacggcgagacctttggcgagaatcgccaaaggtacaacgcccgaaagatcgttgcagatttcttcggtgtgacggagtatgagatccgcaaggccatcaagctggcagcactgattccgccgcttgctgatattttggagaacagtccacgcaagctgccgattgcctgtgcggaactcattgccgattatggtgcagactctcaaagggcatttgtagaaatgtgcaccattgagggatacacactcaataaggctgctatgcagaagatcgtccatatctgtccgccgccgtctgcggagtgccaagccctgtatgaggcttggcggcaggcacgggcagacgaggaaatgcgtcgcgctgcaccacctaagaaaatcgcctttgaccgtaggaaatttgcaccttatctggacaaactgaacggcgatgaagatttagaagagctgtttctggagttcttgcggcagcgaattggctgatgtataatcgaaaaaagaaagagaaaggatagcaacgctatgagcgaacagaataaaattcagctttttgaaaatcaacccattcgcacggcttggaatgaagaacaagaggagtggtacttctctgttgtcgatgtaatccatgtactgactggaagtgaaaaccctcgcagatattggagtgacttgaagcgcaagttgaagtctgagggggcaactcagttgtacgaaaatatcgtacaactgaaaatgaaatcgtcggatggaaagaactataagaccgacgctgccacaaccgagcagcttctccgcattattcagtctatcccatccccccgtgcggaaccggtgaaacgttggctggcagaggtcggcagggaacgcattgaggaaaccattgatccggagcaggccatcgaccgcgcattggaaacctatctgaaaaagggctatgaccctgattgggtacatcaaaggctgctctctatccgcattcgaaacgagcttaccgatgagtggcagaaacgcggtgtggaaaaggggcgtgaatttgcgattctgaccgatgagatcacccgcacgtggtccggcatgaccacgcggcagtacaagaatctcaaggggctgaaaaaggaaaacctgcgagacaacatgagcgataccgaattggtcttgactatgctggccgaggcgtccacccgtgatatttccaaagcctccaagccggaaggattttccggcagtatggaggttgcccgacagggcggtgaggttgccggtgtagcacgaaaggctcttgaggagcgcaccggcgttccggttattactgcgcagaacgccgcgcagatgaacaccttggttgtgagcatgatcgaagaagccaccacgctgccggcgcaagccgaagcagatgacaaagaataataagacttatgccagaaggctcgacaccgcaaggtgccgggcctttttctatcccattgtgaggtacaaagatgaaagaaatgaatatacagttccacaaaacacgaccgcaaaatccgtttgacgatggggcgaaggcccgtttgcaccgtatgggccttctgaggatagatggaagtgtggacgaagccacattgaacgccttgagccgcgcctattccggcttattgtttgatgacttgtgcgacacttgccagaattcttgtgagatcacagagatccttcggagactatatgaagctgcggagcaggccgaaccacggcaaaagtttctgctgatctgtctgcaatacgacgcgctctctcagccgcttcccaatccgatttggtggatcagcggtgattcggagcttgccggggactttgcagagcgctttatctgccatctgaagaagctgagcgacgcaatggaggtgacagagccatgaagggaatcctgatctatcagccaacaagcaagtccgctccgctcgccgattttattgacgggcttgacccgcggctgcgggagaagatcctcctgcggctgtatttcctgacccagcttgaaaagccggaaatgaaagaaccacatttcaagcgattttcaatcgagcgctatcgggatctttgggagctgcgagtaaaaagtaaagtgctcatacgcatcattttctgcacgcttcccaatggagatgttctgcttttgcatggctttgtgaagcgtcagaagcgggatacaatgcaggcgctggagcagtctatcagaatacttgacgcgctgcgggaacatccggagcgcgcggtagaatacaagatcaaggaggagaaagcgtcatgaagcaggtatctggcataccgcctgaccgtatggcaggaatgcgcatcacaaaaattatttgagaaggaggctctcccaaacatgaaaagagtaatatcctgcgtgctgctgatgctggttcttacctccaacgcctttgcgttggaggtgcctacggacacggtggttcaaaacctcaacggcagtcagcaagcgatcaaaacctttacagtatcccctgagcaggaccctgcggcactaattgaggagccctttgagctggaagggtatctctacacctttgcggacattgtaaaaagtgagaatcccgtggaagaaaagcggattcataccgaggttatcaccgttgaaacaacgaaagatgaccttgctctgattctggagcagcttaagcccaccatcgagtatgatgacggcagatttcagggtaccctcgcattggatcacaccagtctcaataccgtagccgccggctatgctacgaaaaactacacggtgacggaaaccaaaaccatcggacagcttgaccgcaacgatatgtcctatgtccccgcgacaaccatcaagaacggcagaaccctgagccttgccaatgtggagtggcaggtcaccggcaccgatcttgtgggtgaggcgctgatgccctctcaatatcaggctgttgctacctactctgcgaaagcgtcctatcaggcggctacaggctatgttacaacagcggagtatatcggcgatgtgacccacgagggtgttgaaagtgttacttatgttctgacctatatcgggacagaagcgaaccacaagggcgtgtctgccgctcaggtcggagcgttttttgcggatcactttccttggatcttaggtggaatcgttctgatttgcgccgctgttggcggcacgctgcttgtatgccgccgaaaggccgtagtgaaagcagaatgtgaagcggatgaaacagaggaaaacgaagaagatcaggaggcgtaaaaacatgaaactctttcagaaactggtctgcatggcattgacggcgacagcaacagcatccctttctatttgcgcttttgccgcggactatacctttgacacagccgcagacaccgactattacccttcaacctcttatgaggacacctacggtactgcgtatcattacggtagcaaaaatcttgtggattatcagattcccgaacttccctacggcgttctcagcaccacacaaaccggcgtcatggaaaagctccgactccccggcctacagcagactgtaggcggttcggcttccggtatctacggtgtggatagtggcgtaggtatcccagcggtcacacccgtcattccgtcctatcaggagcctgcttatacaagtgccaaagatatggagcgaaaggacggcagcatcggtaccctgaaaattccctccctggacatcaacatgaaggtctgggaaggagaaaccaacgagagcatgaaaaagggactggggcattatagctccacctcagcgtgggacggcaatatcggcgtgtgcggccataaccgaggcgccaagtacaccatcggcagcatcaaggatctggaaatcggtgacaccatcacctataccacaatctacggcacccgcacatatgaggtcgttttggtaaagaccatctctaattccgactggagttatctgcaggcgacagcagacaaccgtatcacgcttaccacctgcctcgctaatcagcctgaaaaaagaatttgcgttcaagcagtgcaaataacgcaataaaatgatggaaaacggatggaattgtgcaaaaaatgttgtgtctccgttttatcggcgtaaggatttaaaataaacctttgacagcctgaatcttctgtattatcctcaaatcactccggagaatcttaatcaaaaggaagtatcagtttggtacagaatttcagaccaaataggaaagatgacgaaatacgggtcaaaatggacatcactgttgaccttcccgcggaagtcgcggaacaggcagaacggatgggcatttgcgagtttgatcaatgcacctttgacgaagctacccgacgcatgaccgcaagtgtaaccaccgtcttttaccggaaaggggcgtgatcatttgaagcggatccgagttatttccctcgctgtaattgctgcactatccttaacagtaacttcttttgccgccgaaaaaagtccgcagcagtctgctgccgcctatctgagtgaagccggcattatgctgggcaacgagtccggcgacatgatgctggagcaggggctgacacgggcgcagatggcggcgctgctcacccgagttgtcgcagatcctgaacaatttgaaacggacagcgccttttaccgcagcctttgcagctttacggatgttccggaatgggcaaaaggctatgtgggctactgcgccgcaaataatctggttgcagggtatggcaatggacgctacggctccaatgaccctgttacttctgcggcggcctgcacggtgatgctgcggtgcttgaatgatgttgatgctgtatgggattatcagtctgcctgccggactgccgttcagttgggacttgctgcggaagaaactgttgcggacgccgagattacccgcggaaatatggcggtgctgatctgccacacgttggcaaggcttggttatgacgtgaaattgtccgaaactacacagccaaatctctctgccaatggaacatcggacgcagccgccgtgcaggaaacagcagagcccttcgatgctgctgcggccaagcaggacatcattgaccgaaccaacgctctgcgccgcgaaaaaggtgttgccgcgctgactgtcaacgacaagctcatgcaggcggcgcaggtacgggcagatgagatggcggccagcggtgtctactctcacacaaggccggacgggagaaagtatacgacagtcacggactgcaaatacatcggtgaaaatattcacttgatcggagaatggcagattcgagattcttcgctcccgtcctttgcagttgaagcgtggaagaatagcgcggcacatctgaaaaatatgctcaatacgagataccatgcgatcggcgttggtgtttcacaaggcactgtcatgggcgagccctactggtattgcgttcagcttttcttattggacggctacaatgtcacatgggtggatgcgcccgcagcaaaagggtgacttcgcataatcagttgacattaacggaagtccaattacgatgaacaatttcataacacaaccaagcagaccgaggaaacttggtctgcttatcttttgcgaaaaaggaggaaaagaccttgaaaaagatgcgaacaagacttttatcactgctgcttgtactggtgaccgttctgagcctgctgcctacctcggcattggcggcctccagcaccggtaccggcatcaaaccgaccagcaacacaaattactggacgacccgcctgctccatgatggaacgccctacagctataagccgcccatggcggcaggcaaaatgctctactgcatggatcgcggctatggctatcgctgggggacagcctcgtttctcaacagctacacctatacctctgccaccggagccgatgcggacgctgtcttgaaaacggccctggcgcaaagtggcatgggtgagctggacgcccagcagcttgaaaacttcaagtggatgatgacctatatcgtcgattacaagggaaatattcccggcagcctcttcatggcggcgcagacctatgtgtgggatcaccagacctttaagggtgagggcgatggagatattgacggtggcggttacgccaacgcggatacctatgaaacctatctcggctatattgactggatgttagccgaaaaagcaaaggaggacgcagccttccagaagcagatcgaggagtacgccgcacagggcgtcattgctacggttgttgaagataacaccgcaaaatgggcagtgtgggcaaagtccagcgtaaagggccgccagagttttttcaactattacgcgccgagaaaactctctcttgaagcgcagccgggagaaccggatattccccctgcgggtacaggcgatattacgctgaagaaggttgccgcaggaacaacccgtggtttagatggtgcccgctttctgatttaccgggacggtcagatcgtgggcagcgatgtaacggcaaacggcggcatcattgaggtcaacgacgtcaccaagggcctgtggagcttcgtagaaacggaggctccggccgggtactgcgccgatcctacccctatcagcgtctatgtggataccacggacggcgataagcagtacacggtcactgccgaaaattacgcactgcccgatatgaagatcaccaagcgcgacgccatgagcggcaagcctatcgtcggcacggtcttttccattaagtccgttaccggaagttattccacctccgtcacgaccgggacggacggctccgcaacgctctcggccattcctgccggtgtctatgtcgtgcgcgaggaatccgttcccgagccgtacatcgtgagcaatacggagcagaccgtggcactccgccccggcaaaacctccgaggtcattttcgttgactatgaaaagcccggtcttgaaattgtcaagaagaacatcgccaatggtgagcccatcgagggcgtgacctaccgcatcgagcagatcgacggcaacttctccaccagcgccaccaccgataaccatggccgcatcttcctcgactctgtcccggttggcacatttaaggtaacagagatcaatgttcccagtcatgtcattctctgccccatcccgcaggaagtggcgttgaaggctggtgaaacctctaccgtcaccttcttcaacgccctcaagcccagtctggagatccgcaagttggatagcgtcaccggtgatcccgtcaagggagccaagttccagatctggtatgccagcaaccacaccgacaccggcgagctcaatgacctcggcacttacttttctgacgcaagcggaaaaatcattcttcctgagatcaaggatggctggtataaagtaacggaattggaaccggcgtccgggtacgccatcaaggagcctgccacgcaggaatgcttcatctccggcggcgagagcaaagtcctgacatttgaaaacacgcccctttccgccatcatcatccgcaaggtggacagtgagagcggtcagccgttggaaggtgcatggttccgcatccgctaccttggcggcacctccggtacgggtggcacggtcatcggcgagtaccgcacttcgagcaatggaaccatcgtcgtgaccggtctcaaggcaggcacttatgtctgcgaggagatttccgcgccggacgggtacgtgatcaccgatgccacggaaacagtctatctttccggtaaggatcaggacgtgatcaccgtgaccttcggcaatgataagatgggttccctcctcatcgtcaaaaaggacgccgtgaccggcgctcccatttccgatgtggagttcttcatcaccgattcggatggcagcgtgatcggcaacgccaacggaaagtatgtgaccgatagcgcaggcaccatccgcattgacggcctgactcccggcatgacagtcatcgcccgtgaggtgcgggcaaaagacggctacattctggacgataccccgcagagcatcaagatcaagcgcaactctgtcatgacgctggaattccgtaatcagcccaagggcggtgtgcttgtgaaaaaggtggacgctgtgacgaatgtgcccatctccgatgttgagttccttgtcacagattcggacggcaatctcatcggcaacgccaacggcaaatttgtgacggacagcgtgggcacgttcaccattaccgacatcgcccccggtaccacacttgtcatcaaggaaacccgtgcgaaggcggggtacattcttgacgataccccgcagaccgtcaaggtcaaatccaacgaggttgtcacggtggagttccgcaaccagcccaagggcaacctcatcatcgtcaagcaggactccgttacaaaggagccgttggagggcgttcagttcaaaattacctacgcagatggctcgtatgtagatgccgagggcggcgcgctgtcctccaccggcctgtactggacggataaagaaggaaaaatcaccatttccggcatctccggtaccgtggtggtgacggaggttgagacaattcccggttacaccattgatgaaaacacccgcacgcagactgtcgtggtcaatcccaatgacacgcaaacgcttcacttctacaacacgcctattggtggcgtggagatcatcaaggtcaacgaggataaccacagtgagcgcatccccaacacgacctttgagatccgcaaggtggatgatgccttggtggataccgttacgacggacaaaaatggccgtgtgttcgtggctctggaggatggcagctactatgcaaaagaggtcacatcgaacaaatcgttccggctggatgatacgccccactattttgagatcaaggacggcaagcgtgtgacgctgcaggtgaccaacaaaaagctcagcggcatcgtcatccacaaaattgacagcgccacgggagagggaatctatggcgtaaagtttgtcctctatgatgcgaacaagaagcccatcggcgagtacacctcggacgatgagggctacatctacattgacgagatccctggcgggctgagtggccgcttttatctgagagagctggaagccgcccccggctacacgctggataagcagtataagaccgtctatgtctctccgggcaagaccgtggagatcgagtgggaaaataccgctgtcacgggccagatccagatttataagtacgccgctgagtataacgaggtcaccggcaccgccgcaggcaccccgctcaagggcgctgtttatgagatcgtcaatgcccgcagcggcaaggtggtggactatatcaccaccgatgcccgcggcgttgcggcaagcaaggcgctgccgctgacccgttatcagattcgtgaggtcacagcgcctgcgtattggcaggtgtcctcggaaatgtttgatgtcacgctggaatatcccagtcagatcatcaagctgtctgcctacgataaaccttcctctctgggcgttacgatcaccaagcgcggcaatagtgctgtgatggctggcagtcagatgcgctatgacttcaccgttgccaacaccagcaatgtgccgctggagtcattcttctggcatgaccgcattccaacggatattgccaacgcaacggtgctgagtaccggcacctacagtgcgcggcttacctaccgcatcctctataagaccaactacagcgcaagctatcaggtgttggcgtccaatctgctgagcagcaacaactacagctttgccctaaacgccatccccatgcaggcaggtgaggtggtaaccgacatctattttgacttcggaaccgtgccggtgggcttccagtctgtggcgaatcccactctgagcgtgatggtcaagggcatggcggtcaatggctaccagatggtcaaccgcgccgatgccggcggcaagtatcagggtacctggcagaccgcaacagccaactggatcaccattgtccgcaagatcggcactaccccgaaactgcccaagacgggatattaactactgaaaggcggcaaccagctttacgctggttgccgcctgctatatacaaattatgcttcaatcattgtgcggaaatcgacttgatgagtaccgttgtcagaacacgctggctttctctgctgcatgattcacagaactgatttttcattgcaaaatcgaccgcagaggaaatgcgccgaagatcctcggaatctaatgtatccgctgcaagatgctgccatacacgggaataggcttttctcaggtcttctgatgtatgattatcagaaaaaaaggagccgagaactccttcaatcattgcaatttcctcgctcgtaaatatcaaagctatcacctcataacgatttaattataacgaaacaataccttgattgcaaggacacttttcttggctcgtacaatgagtaacggcaaatatcaaaaaatctattgtactatgcagcttagctttattttcatatgacaaaaagatcgaaattcccgattccagtattctctcgtaaaaaggagccgctttctatgatcagaaaatgctacaaattctacacacttattatgaccctgatgtgggttatggccgcgatgaccgcatcagcctttgccgtagacgatatgtggacagttgccaaccgcattatcgtagatgtttacacaaaaattgtcggcatcagtacggtgctggcaggtttaatgtccgccgttgccgtgatcggcgcaaagatttcaaataatcagcataagaccgatcaggcgtgggattggctcaagcgcatttgggtcgcatgggccattatcaacggcatcggcgcttttatcgcctatgttgcaccgctcttcagcggccttgccactctgacgccgtaatgaggtcaaagctccggcgcaaaggaggtgtccccgttgcttgagcttatttttcaaggctttctcgaatgggcctatgggctcgctctggaatgctggcaatatttctctacggcgctgctggatattatgagtatggattttgcatatctgaaaagccacgctcccgttgtggacgagatcatgcagatccttctggcagttggttgggctctcctgatcggcaatctggtttttcaggcgctcaaaagtatggcagtagggcttggctttgaaggagaagatccaaagctgctctttgcccgcaccttcgtttttgcgtttttactgctggcaagtccgcagatctgcgagatcgggctgagtatgacgtcaaagatcattgagctgctccagattcctgacgcagttaatgtcacatttgtagatgagagcgtattcggagccataggtgcagcatggctgctggtcattattttcggcattatcgtgatgttcaaggtgtttaagcttcttttggagattgcggagcggtatgtcatcctcgccatgcttacgatcacagcgccgctggcctttgctatgggcggcagcaaaagcacctcggagattttcacaggctggtgccgaatgttcggcagtatgtgccttttgatggtgacaaatgtgattttcttcaaaatgctgctgtctgttcttgccacagttcccagcggtttagatgttctcccgtggattgtactgatccttacgattgtcaaggtcgcacggaaagcagacgccattgtaacacgcatcggcttaaatcccgctatcaccggcgactctctgggaagaggactccccggcacgctgacttatatggtggttcgcagtgcggcttctcaaattacaaaggcagtgggcaagtccgcaggaaacggcggcaaaggcgctgcgcccaacgcgccgtccggcggcccccgcatgggcgggcccagcggaggtcatggcaacacggcggagtatgtccggcaaagcgcagcgcagcaaagcagcacaaatcaaagcacatcacagaaatcgtctgatgcgcaaagcgcctcagtacatacaggcgcgccgcaatcaccctcgcaggaaaagtccgccccatctgctgcgcaggacagtatgcctaaaaattcgacagcgccaaggccctcgcaggaacggaaaagttctgttcctctcggcacacgccgctctccgacacatatcaaggctgcaacaaagataccgcctgtcggtgcgcagaatgcatccggcagacccggtacggcaggaaaagctgacgcttcggcacgccccagtgtggcgggagcggcagagactcttcaaagcggcgtgcgctccccagcctcgcagcgcatgagagtacattcgccagagacaacgcagcccagccgtgcaggaacgtcggcagcaccatccgcttcccgtatgagtcagataaacgcacaaaaagtacagggtggagcaactggtcaggtgacgcaggccgcagagcacacagggatcacggtgggacaaaccaccgtgaacactttgcaggacaactctccaagacctgcggcggggattggtggcgcgatgcttaccaccgcctctgttcgcggcggaatacagaccgtgcagcaacatacacccaatgcgcgctatacgcagcggccacccaagcagccaaccggtcaggcatcgccgcctcgggcggaaagcccgcaccccggcaccgcaggaatgcaaagcgccgtttctgcgcagcggccgtctggagaaccgcgacccggcaggaatggtattccaagccgcacggcagtttctccggatgcacggcagcatagtccgatccggcaggaatcgcgcagtgcttccgcagccgccgcgccgacactcaaagggacagcgcctaaccgacaccccgacccggcaggaacggcggcaggcgtcccatcggcatcacagtcgcggcagacagtcagaccgtccgcaccttctgcgaaaagcagcgcgcagcccggaaagaaagcggtatccacaactgcggcactcaaaggcagcgtaaaggcagacggcgatgtaaaaccgtcaagaaaacagcggggtaagaagcatggatgagaaagacaattcccgatcttcccttcaaacggcggctgatcttggccatgccgcaaaagcagcctaccggattgcgcaggctgctgcggtgtctggtgttcacggtgccgctgccgctgcggtaaaagaaaccgttccggccctggtaaagtttctccttgccgttctgctcatcctaatcgtgatcccgatggtagtatttacagcgctgcccaatatttttttcggctacgattcctctgataccgcttcggtgatccatatgacggaacaagccatgcgtataggcggggcgtatatgagtctggatgatttcgagcgaacgcagatcgactccatcgtaaccggtattgcggcggaatatgaggcggatggaacggcaattgaccatattgaagtcaaaaacacgatgaaagagaatgacctgctctggatcattgcaatcaattccgccgcctatgagcaggatctggacgccatgagcgcggagctgattcagaatttctgccgatccaccctgtcctatcagccatcgctttctcttctgggtggcagtacctccgcaacgctggaggtagagatcaagcggatcgatccggaagagttgatggaacagatgggcttcaatgaggatgccagacagtgggcaggcgccctctttgaaacgctgaaggatagcggcgcgcttgagaagtacggcgggtacttcagcgcctaccaaccggattacagcggggatggctcctattccggcgatattcagcatggtacaagctatgataatgacattgacatttcccgttttgtcagcccgtctacgaaaaataatctcgaccttgccgcctatgcggtgcaggcgtgggagaacaactggggctatgtgtggggaacctacggcaatattctcacagagtccctctttgcctataaaaagcagcagtacccggacggagtcggcaattacgctgattttattgaagcaaactggctgggacggcgcacggcagactgcatcggcctgatcaaaggttatgcgtggctggatgcttccaccatgcgcatcggttatgccgcaaacggaatgccggattacggtgcggatcagatgtatcaggcggcaaagaatgccggcattcagggaacagactacggcacggtatcctccatgccggaaatccccggactgatgttatggaaaagcggacacgccggcgtttatattggcggcggttacgcaatagaagccatgggaacgcgaaaaggcgttgtgaaaaccgaagtcagcggacgcggctggcaggggtggtgtaagctgccctatatcgactatctggaggtggagtaattggcggagacaacctatttacgctatatacggctgaaatgcggcattacgctgatggaattggaagagcacagcagcttcagcaaccagtatttgagcctgctggaactgggcagggcaaactgtacgcccagaaatgcggaaacgctggaccgtgccatgctggatatcattctctcccgtgcagaggagctgatgaagctggcacagatttgctatgagcacaaaggacatctgttagatgccgtggaggtggatccgaatgaactatgaggtctatcacattcctaccaattttacagatgcaggccgcgttatgggactctttgagctgcggaatctggtggaggctgtcctcctgacgctcccggcactgtatctttgcattgcttttctcccgctggatctgactccgaaaatcatagtgacgctgacgatcattgtgccgctgggcggctttgggctgatcggcatcagtgatgacagtatgacacggtggctgggaagctggtggaaatggcggagatcccgccggattatcttatttcgaggggaggtcaggaaatgaatctcaaggaactgatttttggcgaaggcgtccataccggcggcagcggcggcgtataccgtgacagcgtgcaggcgtggctcccaatcaaaaatatcatcggcggcgtagtcatcaccaaagataaccgctttgtgaagatcatggaagtgctgcctgtcaacatctatctgaagtctgccattgaccggcagaatattatctcgtcctttgcatcgtatttgcagatcgcgccggatgaactgcagatgatcgcccgcacgctgcccgcggacacgcaggcgtatgtagagcagatgcagcgctatgcagaacaggaggaaaacgaagcgtgccgggagatgatcgaggataacattcgggagatcggtcacggcatcgccggcggcgccatgcggcatcgcttttttcttgtgtttcagtatgaaccctccatgcgggccaagcgcaacacggtgcaggccatcatccagcggctcaacgaagaggccgacaccgcaaggcggtatctggatctatgtgaactggaggtattagagcctcagtattccgataattttgtgctcaagctgctctatgagattttgaacaagaaaaccagccagcgtgtgcgtttgccggagggcgttttcgatatgacaacggccgttcacggcatttatgaggagtaagacgatgcaagtaaagaaaaaaccgaaaaaaactgcaaaagcagttccagagaagtccagaaagaaaaaacagccttcggaagatcaaatcaaaaaacagccttttttgaagcggatgctctttggcgaagaaaagccggatctcagtgagcttgaagccggctccaccaccattctcgacattctctctcccaccacggtggatacaaaaagccgtgactacatcatcgtagacgacgtgtatcatgcttatctctatatcacgggctacggttacaccaccacggttggcacctgctggcttgcgcctttggtggaggctggcgaagggattaacctgagttttctcgtcaagcgtcagcccaaggaaaagatcctctccaaaatcgcccagaccactatggtcaaccgctcccggatgcgggatgtgggcgatacgcggcaggactacgaggaactggatagtgcgatcagttccggcctttatctcaaggatgtaatgaaccggcaaggcgagaatttctattatatgcataccttgattgaagtgacggcatctgatcccgaaacgctggaacagcgcgtcacagaggtggagaagctgtgcgtatccgtggatatgatcgcacggcgctgcgactataaaaacgagcaggcgtttctctcggctcttcccattctggcgcttgatccggatattgagcgtaaggcacgccgcaatgcgctgacctccggcgtggcagcagcctttccgtttgtttcctatgagctgagcgaccatgacgggatctttctgggactgaacctctataaccgctctccggtatttctcaatccctatgatgattataagtacaccagcggcaactggtggatcggcggctctaccggtgcaggcaaaacggtgacgctgcaatgtctcggcgggcggctgcgggagcagggcaagcgggtcatcatcattgttcccaagaaagggcatgaatttcgtcccctctgtgagcgtctgggtgggctgtatttgcgaatgtcgccgtcctccaaagactgcccgaatctgatggcgattcggcggaaatcgctggactcctacgcaaagctcaaaaatatcgccgcgcgggatgactctgtgctggcagacaagatcgcgcagctgatcatctggttttctctgaagaaaaaggatctgagcgaagaggataagagccgccttgactcctcgctggtggaagtttataagcgctacggcatcaccttcgacaacagcaccattgtcgatgagaacggaaatttccgcaccatgcccattctctcggactggtatgagattctttatcaagagcaggacacgcggcatctggcagtagtgctctcccgctatgtcactggctcggctgcggcaatggcaggccgaaacgatattgaacttaacaataagtacattgtcctcgatctctccggtatgccggatgatatgatcgcggacggcaccttctgggccaccagcatcgcctacgacctcattatgaactgtgaggacgaactctcggcgctgctggcagacgagttatggagccttgtgggtgctacggcaaacccgcaggcggcagggtttgtgctggaaatggtaaagaccatccgtggccttggcgggatcgcagttaccagcacccagggaatgcaggaccttttcagtctggagggcgggagttacggcaaaggaatcctcgattccagccgcattaaactggttatgcagatggaggagcaggaggcacggctcattcaggataagctgaacctttccgaagatgaggttcggcagatcacccgctttcggcgcggcgagggacttctctgcatcggctacaaccatgttcccattgcgttccacacgacgccaaaggaatatgaagccattaccacttcacccaccgatctgcgcgtaaagcgaacggggcaaatcgatgaatgatctaaagcgggatatgatgcggattcaggagctgatcggcaatgccttccgacagaccgactctctggttgccctgacagacggcgggcagatgaatccaaacaagctgcaaaagacattggagcagacgatggaacaatttgaagcagccactctggaactgcgaaaactctgcgagcggtacgcaccgggaagcgggggctttgcgaaaaagccgattctgccatccatggatgtaacgggcagcgtggaggcctttggctatggctggctccatatcacgatcaatacgctgctgccccattgccggtatcaaagcccaaactggctcagcgataccattcggcggctgctggacagctatgaggcgtgtggaaaggaattgccgttttttgagcgggccatgctgatcattgatgagcataccgccatggaaggccggcatattttcgatcaggacaacaaggggtggaaggcggtcagcaacgccatcaaaggaagacttattccggatgatgaccagcatacgctggcagtcgcccttctttctacggcagtgcaaagccaggagtgctgtcatatcaccgtcctgcccctgtccgatgctcatgactttttctccgcacattccagtgactatgcccccggaaacttctatttcggtggatggtgctgatgggcaaagcaggtgaaaaagctgcgaaaacacccaacagattgctgcctgatttcaagcgccttggagctgctttgcagcgcggctggcctgttgggtgtcagcgggcttggaaggcttgaaacaacagcttttttgagaagtgtttttggccggttttcgcatactgacctgtctactatgtgggggcaacaggctgcgcccacatagcggctcgtaaggacgccgaaattgttcttgcgccgttttcggcgcaagggcgatttcggcgttcgcaggaattgggaagggagtggttcatgtgtgcttatgagcgtaagagatatggatgttctgaggcttctctgctggtgtcaaaatgtgcgtcccgatgatttgagcagtatctctacagaaacagagcgtgaaaacttgataacgctgggcttgatcaaacgccatcaacgaagtgacacgctgcttctcacaaacagcggtagagcctttttgcaggcagccttagagggtgatgttccaaacttgacgctctcgtaccatgatgcggcgattgagcggcgtgtgcggctttcctctctgatgatgactgctcaccatgcggggatcaatgtattcacaataacagcgaacagtctggcggagccttccacgctgtttattactgcgattacaagaagccgcggacacaatccatggggcagtgcccgcgtcggggcgattgcacatctgggcagcacttactacgcggtacattatatctattctggaatcggccgcatggcggtcaatgacgaactggcagcgtttcataatcacaccaatttcggcaaagacacgcagcgtgcctttctctttgccggagcttcctacgctgacatcatagaggaactcaaggtgcgtgatgaaaagcgggataccaagctgatccgatacagcgaagcctatcggggacttcactatcccgttcacctgctctcctgcgatgaaacaggcgcgcgtcagcttcaaattatggctgttccggactaccgcgtgaagatttcaaagctgatgctgcgctctgcttaccgccctccgccggaggatgctcccgcgtgggacgccacctaccagaaccgtcccttcgtcattggagcggatatgaacctgcggcggatcgacgccgccatcgcaagcgcaaaaaagaggggatgcctgccgatttcactggccgccttggatgctcagggtgacgcggtgctgctgcggcgctataaagataccggctacgccgtcatctataaggtgacagagagcgttctgacggagctgttcggccatcctccgtcgctctatcttcccccttgcacacaatatctgacgaagaaaggagccgtggtggatgccccgcttatccaagttgatcgaaaagatagaggattgcctcgcaaataaatggggctgctggtatgaacgaaataaggcccgcgtgccgctgtatgcggtgctgggcggcatcggctggtatctctacggaatgttcctcaattccctcaagttgggaaaggaatccgtattcaaccccaccggtgaagtgatcgagagcatttgggtattcaaccccttcaaaaatctcttcgctgtttttacgccctttggccttggcgtttccgccttcattgcccttatggtctgcctcattacgaaaaaaggctacagctggttttcaggctacaaatttacccgggacgcccgcggctttgatatcctgccggacggcactcacggcacctccggatttgcgacaaaaaaggagcttgctgagcatctggagctgggcagcgccgaagaagttaccggaatgctccttggacgcattaaggcgcggccggatgatccggaaaaatacgccacctacgtggcgcaccgcatgaagcctggggaaaacaataacatcctctgcatcggcgcacccggctcctataagtccagaagctttatcattcccttcctcatgggctgcgcgcagcgaagcagcggcggacaccatgaatccgttgttgtgaccgaccccaaaggcgaactctttgaaaaccttgcgccgtattttcgggagcatggcttctatgtcaaggcggtcaatttcctcgatatggcgcactctgacggttggaactgccttgcgggactggaagcaaatcctgaccttgtaaccaccgtggccaacaccatcattcaaaacacctctggccccaaggaggcggatgacttctggagccgtgcggaattgaacctcctgatggcacttatccactatgtctgcaatctgaaggatgcccgcggcaatcttcttccgttggagcagcgcagcctcggagacgtctataagatcctcgcctataaaagcgtcaacgagatcaaccgcatccttgcggagctgccgccggagcatcccgccaaaggcccccacggcctctttctgaaggcaagagaaaacctctggggcaacatcatcatcggccttggcaaccggctcgcggtctttcaaaatccgctggtggacaagatcacccgcaaccacgatgtagacctgcttcttcccgggcaaaagccctgtgcgtactttgtcatcatttccgcgcaggatagcgcctatcgatttttaagctccctctttttctccctgaccttcccgcagctctccaattacgcccgtctccatggcgggcggcttcccgtactgacaaacttctgcttggaagaatatctcaacatcggctacatggagggcatctctgatgttttcaactccatccgcggcttcaatatgtctgtgcaggtggcggtgcagtccctctcccaatggcaggaaaagtatccggggaaggaatgggaaaatcagctcggttcttttgatatgactctctacatgggctgcaacgatatgacgagtgcggaatactttgctaaaaagtgcggcaaggttacgatctccgtcaccaacaatcagtttcccttggcaccgctgttttctcccatctacagtaccacccgcccctattcccagacgcgaagcaacacccagcgagacctcctccagcccgatgaattcctgcggctcaataagtttctctgcattgtgatgttcaaccactataagcccacccagctctataagatcatgctggaggaactgccggaatacaaaaagctgaaaaaatgcagcgtctttgactatgtgccggaatggaaaaagagagaagaagagggtgcaaagcgtcgcacggcaggaaatcgcacatcggccgctccgcccgcaccacagtcgtcgcctgcatcggggaaacggcagccccagacttctcccaccgaagaagccgcagccagcggaatctcctgcggaaatgacaacatgactccggaggagatcggtcttgtggagatgacctgcgaagctattctggaaggcgatgacccggaactggaagagatggacgatcccacgcgcattccacccgggcgcggaatatgaaaaagaggtcgagcaatcggcctcttttgaagaagatattccattgtcagcgtgctgtctgaccgtactctcgcttcatggcgtcaatagaaacgccccattgcctatatcgaaaaagaaagaggaggtgcccgttatgagggcagcgaaaatgaaagagcgtccaactttccaactgatgtgccagacagatgtgcagagtatttatcatatgcagatgccgcgctggttattttctgatccacgttactgcgagatgagcctggatgccaaggtgacctacacctttctcttaaaccgtttccagctttcccgcaaaaacggttgggtcaatgaccgcggcgaggtctttgtgatctttcctcgcaaagcgcttgccaaagagctacgcatctgtgagcagcgggtcacggcggcttttaagaagttggtggagctcaagctggtatgggaaaaacgctgcgggcgaggtgatgccaatcagatctatcttgcccgtgtcacaccgatcgaagatccggactattcctgtgcgccgtttatcacggaggatgaatcggaagtacgcggttcaagaacctcggatctggagggtcttgctgatgggaaaccttcagcagcatgccaagaaccgcagaatctgctgtccaagaatcgtgaagatcgcgcttcaagaactgcagaatccgcgttcccagaaccgcagaaattgacgccaagtaagaaagaaaaaagaaagattgatcaaagtcatatggaagtccgtccgtctgtcagagccccggtgcaggacggacggaccgacggggacgcagaagaagaacttttggatattttggacggctgcgagcttgaatgcttcgcaccggaaaccgctctggtgtttgaaaacgccattgagcggcttttttatgccgacagcttccgtattggcaatgccacgcttccgcaaagccgtgtgcgggcaaagctcagacggctggacggcatgatcctgcgggaggcagagagtaagctccgcgccaatcaggagcggaatgtaaaaaacagcacggcctacaccatggcagtgctgttcaactgcattgccgaaagtgagagcgatcttatgatcgacccatatctcaacaccatctgcgcggccgtttgaagggagggaaaacaatgctgctatccaatcagcaaaagtatattctcgaaatactcaaggagtttaagtacctgcgtgtccgccagcttcatgctctggtgcaggcccgttaccgtacacaggaaatcaaaattgacgaaaggcgcatggagatcatgcttcgccagatgcgcacaggcaccaattatgtctggctgcggggtgatgtggtttcttacggagaccgcaggatagaccctcggctattggaagcactggacgttatgctggagcttacaagggtgcagcccggattttactcgaaagacggactgcatgaaccatttctcctgcgctttaccggaaacggaaagggggccggataccttttcagcgtggcatggctggacgccgctactcacattgcaaccgtcccccgtatgaagggcgagcggatcatctggatctccgagagcggttcctttggagaaatcgatctgccccggcatcactttttcgccgcccgacagaaggacggtactcatcgcttttttggctccaatgagccggaaaaaatataacacttaggaggaacattatatggcaaggaaaaaagtcaccccggaagaagagatcgtaaatgctgtcggtgaagaaactgccctggggagcatcctatcggataccgcgccgcttgatgaggcaggcgcagataccggcgacgttcccgcagagttgccggaggcggatctttctgcggaggaaacggcagagcagtcggaaacgcttcctgcaatggaggcagccgaggcgaaaccacttggactttccgcagaggagaaaactgcatcccaagacgaaagcgataccgcagaggagcgagcggaagaagcggaactgcacgaagagatgtcggaatttccggatgcagaggagaatttgatttcagatttgcccacttctgttccgcaggtttctgaggccgatgaagcggactggggctttgtggaaccggtcccggaagaagccgcagcagaagctgcggaggatgaatacctggcagcagataacgccgaaacgcttgatgcgtcggataaaaagagcgagcgcacgctcttctacgagctggacttcaacgaactggatcgggggctaagtgaagaggagcggaaggaatggaactccgtctatgcctctttccgcggccgcagcgccattaccggaacgatcatcggcgtggatctctacgcaagataccttccgcgcagtgaggcaagaatgcttgaaaacagacgggagctctgtgccgttgtggtgccgtatcgcatccctattctgatccgcgagtccgaaatgtgggagttgggagaggagcgacctgacttcgtgctgcgaaatatggtgggcgccagcatcgatgtgatcgttaccaaggtggagcgtgccgctaaccgcgcacaggcgtcccgccgtcaggccagccgcagccagcgccgctttttcgctgcccgtgaggatcttcataccgccggctcccgcattacctgcaggatgctggcagtcggcccacgccgctgccttgtggactgctatggctacgaccttgatatgacgcagagagagatccgctacgcggccatcccggatcttcgcacggagttccacccgggctcggagatcgactgcattgtaaaggagtatcacccccgtaccggtgaactgattgtttccgcgaaagaaacggaagtcaaccccttctttggtgcggaggagcgtcaccctgtaggctcccgccgctttgcgatgatctccggaaaatatggcggcggcgtgttctgcaacctccctgatggcgtgacctgtatgtgtaactactcctatcagcacgaggatgcggacttcatggtgggcgagcacgtcatgctgatggtgcagcgctacgatcaggaaaagctccagatgtacggcaagatcatgagcaagtggtgatctttcgtaaacgtcttggatcttgaaatctgtttgcaatttggtgatgctgtttttgctctgtgtgcagtactttctgaacgtgcgaggcggaggtggtatcactaccctcggcgcgctttgcgtgctgtcgaaacacccggcgcccgcttgtcaaagcgactaacttgccattttctgaggtcgggtggtcatcattgattccaatggtgcaaaatgtgcttgacaggtacagtctacttatgatagacttcaagtatcataagtctatcataagtagacccgcgaagaaagggggcgcacatggacggttacaaactgggcgttgttgagacgcgttttgcggaactcatctggcagcacgagccgctgacctctggcgagctggtgaaactatgcgaacaggagctgcaatggaaaaaatccacgacctacacagtactcaaaaaactttgcgaacacggtatctttcagaacgaaaacggcacggtcacttctcttctctcacaggagggctataacgccgtacagagcgagaaatttgtggaggacaccttcgacggttctcttcccgcgtttctggcggcttttaccacccggaaatctctttcggagaaggacattgcggaaattcagcgcatgatcgaccgctgcggaaaggagtgagccaatggccgccgtctttttgaagctcttgaatctaagcatttccgcaagctggctggtgctggccgtgctggtactgcgcctggtatcaaagcgttcgcccaagtgggtgaatgtcctgctttggggtattgtcgcgctgcggcttgtgctgccattttccatagagagtgcgctgagtctgatccccagtgcagaaacggtcagtcccgtggccgtgcagtctgctcccgcgccgaccatcaccagcggcgtgagcgtcatcgacaatgctgtgaatccctcactcagcgaacattttgccgccgtgccgacagccagcgtcaacccgctctatgtctggacggagatcgcaggctgggtgtggctcatcggccttggagccatgctgctctatgcgctcgcaagctatcttcggctgcgccgacgcgtgagcgtgtcgctccccattcaggataacatttatctttgcgatgccatttcctcgccgtttatcctcggtgttgtaaaaccacacatctatctgccatccgggctggacgaggtgcaacggcagaatgtactctcgcatgagagggcgcatctcgcgcggcgtgaccactggtggaaaccgctgggcttcgcgctgcttgcggtttactggttcaaccccgtgctgtggctcgcctatacgctgctctgccgcgacattgaactggcctgcgatgagcgggtgatccgcacgatggacgagagcgccgtcaagacctattccacggtgctgcttgcgtgcagtatgccgcgcaaggcagtcatcacctgcccgctggcgttcggtgaagttggcgtcaaggagcgtgtgaagaatgcacttcactacaaaaagcccgcgttctgggtggtcgcggcgtcggtcgccgtgtgcgtcgttgtagcggtgtgctttctgacgaatccgcctacggataccgacgccgccggactggtcggtttccatcgggaacaggtcacttatgccgatgtaacggacgcaagcggcgcgcagccatccaacgtccagttgacggcggaagaaacggacgccgtctatgctctgctggatgccctgcaatacaaacgccttggtgctgcgtcagcaatggaggactgctatgcaaggctctattttatcagcgccgcgggcgaacgctgcgagatcatgctctctgagcgtgaaatgctggtcaaccccattactgacggcaagacagcgcggctctatgagctgcgttctggaagtacggagttgagagactatctgtttggatgtattggcgcaagcgagccggcagaggaggaaatgaaaaccatgaccgagccgacgctgtcgctgacgctcaccgttcccgctgcatgggaagatattgcagagctctccgcctacgacaaggggactgcctatctgggatatgggatcatgctgttccatctgtcggaaaagaacgcacttgcggcgtatcccgacgggggaatgggcaacgtatggtggctggtcgctatgagctgggataatttcaaggaatggaggggctatgacgcactgcctgtccccgagattctcggcatcgccgagtatgtcctcggagccgatgatgagtatgtgtatctgctggtgttgccgtccgatgtgcagttcctggaaaacgatcctgtcagccagcgccaatacgaggcactgcaaagcgactcacaaggcgtactcacgcgatttttgaaggacaacggaatccacataaatgacatgtgccctgcctcctccgtgttttcgccccctgcgcgcggcgatgcggtgaacgcgaccggctacgctgcctacgacgcgctgctcgccgagatcagcgacctgcggcgctccggcgcaagcgacgtgcagaccgacttcagccacgatctcctgtccgtgaacgactactaccagacgcccggctggctgctgcgcgatcttgacggtgatgggatccctgagctgctgctcggcgcggactggggcgacggccataccgtgatcttcaatatttaccgcctcgacggcgcaaaagccgttcgcgtcgtggacggctggagccgcagccgctggtacctctgcaccgacggcagtctcgcccacgagggcagcgacggtgcgagcgaggggacctactcttactaccgctatgaaaacggcgcgctgcggcatttggaaactgtgatttctttagacggctggctctactccgatacgaccgaccactatgttggcggcaagggcttccgccctgtcagcgaggacgaggcgaacgcggtgcgggaaaaatatacccacgaaacgctgtcttttacgccatttgtggtatgaggatagatagtgtggactgtggcgcaaggttgcagctcgccagtcctctacggatattacagcctctgacccacttttgacccagaacgcgaaaaaagcgggcagggctggacggaaacaatggaaaatccgccgagcgaacggcggtaaaaagcacaaatcggagccgaatcggctccgattttcccttgagacaacctacggacctgcagagattgacaaggtagcgtcagctcgtacaatctgatttgatcatacccacagtcgctttggctgttggtattttctgtttgaactccaaaagctttgcagaactcaaggagcctaagccttcaccgcgtccaggtatcttttctttttgcgttgtgtattcgtagctatccctttcgggtgatatacaagccctcgcggtgattaagtcatgacttttttctgctcacattttcgcggcaaatctccaaggctgggagcggcaatcataatcgtacaaccagagcagcgccgcgccgattttctcaaattatgtgacgccgtcacagtaaaaccgcttgtcacgcggtatactatacccaaacaaaggaaaggagctgacagatatggcagctatgaatatgaatcaggagcagtttaagcagttgatccgggaggaaaagcctgttttggtggatttctgggcgccctggtgcggctattgccgaaggatcggccctgcgtatgagaagatcggagaggaatacgcggacagcctcgttgtcggcaagatcaatattgacgaggagccgcggctggcgggagccgaggggatcgcggtcatcccaactctggtgctgtaccgaaacggaaaggccgtggattccgtcaccgcacccggctcaaaggcagagatcgaccgtttcattcaggaagccttggcgaaataacggagggttcagatatgaacaacaatcatgtttatgatatgctcgtggtgggcggcggcccaggcggctacaccgccgccctgtacgcggcacgggcggggctggacaccgtcgtgctggaaaaactgtccgccggtgggcagatggcactgaccgagcagatcgacaactatcccggctttgaggacgggatcgacggcttctctctggcggagaagatgcaaaagcaggcggagcgcttcggggtacgcagcgaatacgcagaagtcctccgcatggatctgacggcggttcccaagctcttggaaaccagcgaggggatcttccgggggaaaaccgtggtgctggccaccggtgcggaccccagaacgctgggcgttgctggagagacggagctgttgggccggggcgtggcctactgcgccgcctgcgacgggatgttttacaagggcaaaacggtggtcgtggtgggcggcggcaattccgccgcggcagatgccctccttctcagccgcgtggcaaaaaaggtgatcctcgtccaccgcagagacaccctgcgggccaccaagatctatcacgagtcgctggcacaggccgaaaacgtggaattccgttggaacagcgtcgtttccgcgctgctttccggggacaggctgaccggcgtccgcctgcgggacaccgtcaccggtgaggatagcgtggtggactgcgacggcgtatttgtcagcgtgggccgacagcccgccacggcgctggcggcgggtcaactggcgctggacggcggcggctatatcgtggccggagagaccacggaaaccagtattcccggcgtttacgccgtgggcgacgtgcggacgaagcccctccgtcaggtggtcaccgccgtggcggacggcgcagtggcagtctacatggcggaaaaatatatcgcggaaaaccgataagggaggtagattgaaaaagccatgtttaaggtcaggccggatacgaccgcagtggggatgccgacatatctgcaaggcaaactgccagagtgatggcagataagataacccatgtaagatcgggagatatgttgtctctccatatccagtccacgcaacagtgagcaactgaacacaaaacacagccacagatgtactctgcggctgtgcttttatgcgttctcaagactccggtctcgccccacactacatcgtgacctcaacctgagatgacggtactctgcccttgggacataaagcagatgagtaagaccatcatctgtacgagaatagctgcaatagctgcggtttgttgcagcttattccgcgcagagctccgccaccagagcgtccatctgcgcttcgctggtttggttcagtgcgccgcgcagcgatacctccgtttcacacagtcggagttccttcatcttttccaactcggcgcgcatcagccgcgcggcagcaggggcccatgagccgttttccatgaggccgattcggcggtttcggaatccctttgtctgtaaatgttccaaaaactccttcatgggcgggaacagtcctccatcataagtggagcaggccaacaccagtttcccacagtagaatgcgctggtcacggcataggaaaggtctgttgccgtcagatcgcacatggtgactcgtacaccttttccctccagcttgctcttgagggcctccgatgcatatgcggtatttccatggatggatgcgtgagcgatcaggatgccctccggttcttccggtttccattgtgaccagagatcatagagccgcagatactcccccaagtcttctgtgagcagggggccatggagcggacagatcgttttgatctccagcgcggagatttttttcagcagcgcctgcacctgtgcgccatactttccgacgatgttgtaataataccgtcgggcctgcggcgcccagggggcatgggcagtccgttccagtgaaccgaagcggccgaaggcatccgccgagaacagtatcttttcctcctcttcatacgctgccatcacctccggccagtgtaccatcggcgccagcaggaagcgcagccggtgtgagcccagagagatcgtgctgccctcaccaacctccagcatacggtcttccgacaatgcacctgtgccgaagaactgcttgatcagggtaaatgttttcgcgtttcccacgatcttcatctccgggtacttttgtgccagccgcatgaggctgccggaatgatccggctccatgtgtgtgaccacaagatagtcggggctgcacccctccaacacccgagccacattggaaagccattcttctgccgcccgtgcgtccacactgtccatcacggcgatcttctcatccagaatgacataggagttgtagctcactcccataggctggacggggtactggttttcaaagagtgccaatgtgttatcatccacccctacatagcggatggcatctgttaccgttcggatagccatataaaaaatacctcctattttccttactcagactctgactgataggttcttcttttctaatagaacatacgctcaaccgcggatcgacggtcgcgcattttaccgttgccttgcttccccaagagccgttacatgtggtacaccgcagcggagcgaagtccttccggcaggccgtcgggcgcagcaggtgaaagttcccagcgtacctgccccgtccactgggaggcgacggcggagaagtggagcatgacaataccgagatccaatgcggcatccaaattatcggtgtaggcatcctcttgctgcaccaaatagatgctgtgatcctgcacaaggaagccatagggctgacggttgagatagctgggggagagcgaagcggcgtagaaggactgccagagcatatcatcgtagaagtccatcatctcgtcaagcccagacttgttgctccagctccccatgtgaaccaaatcatgcacgccctttttgggcgcgtagtactgctgctcggcccgcacatcgatatgagacatacttaagatattcagccgcagcttttttgcggtcttttccccgtagccaaaggcaacgattgccgccacctctaacggggtggtgagagaaagtgcctttttgattttgtcgctgtcggtgaaggtcatccagcaggtgtcaatgtccaactcagtcagcttgaggacgagatcttccatcatgtagccggcgttgatgcccgcataggaatgcggggcagacataaggagcaggtagtgcggtgctccgatgagaaattgcttatagcccgctgagctctccagtgccggctgtgcatccttgtccaagacgatcaactccgttgcaatctccgggacaagacgggggcaggtcttttcatagtaggatcggagctggccgatagcctcgctcggaacttccttttcgcggaatgcgtgaacggatctgcgattttgaatcatagcgctgtaattcatagtagtgtatctcctattctgatgtctttggttttcttatagatcgtctatcagtgcggtgctcttggcgtaggcggtactgcgtgcctcaaagaaatcggtcttgaccatgttggcgtcggcgtactggctgacccattccatgctctccggttcgctctcaaagcccggatacaatgcgggatagccaaggctcgtccagcgaagattgccgagatagcggatgtaatcgctgatcatctgccggttcagccccgggatgtcgtcgccgatcacataatgcccccatgcgatctcctgctccacgccctcacgcatcatctcgcgcagcgcttgtacgctctcggcggtgaacaactccggctgctccttttgcagctccgtgatgatattgcggaacagccacaagtgcgtgttctcatcgcggttgatgtagcgaatctcctgcgccgaaccggacatcttcccgtttcgggagagattgtagaagaacataaagccgctgtaaaaatagatgccctccaaaatatagttcgccatcatcacgcgcagcagcgtgggagcgtccttccgctcctgaaactcgttgtagcagttcccaatgaaggtgttgcggcgcagcagatgctcgtccgttttccattggtagaggatgtcattgcgctccacaggagagcagatggtgtcgagcatatagctgtagctctgtgagtggacacactcctgaaacgcctgaatggacaggcagagattgacctcgttggcggtaatgtaggcgccgatattaggcaagttcgctgtctgaatggaatccaaaaagacaagaaaactcaaaattttatcgtaggcgctgcgctcggctgacagtaggcggggatagtccttcacatcctgcgagagattgatctcctcagggatccaaaagttgttcatggcctgccggtaccagtcgctgacccaagcgtacttcatattgttgaagtcgttgaggttggtggtattgccgccgatcatgcgccgcaggcgcacatcaaggtcgccctccggattaaagaggggctttttcttcagttccgtcatgctatcctccttatgacgagcagctttcgcagtcctcgacctcaagggccttgctgcggacatagtaaatggtcttgacgccgaccctccacgcctctaaatacagtctgagcacctgacgcatggaatagtcattggtgatatagagattcatgctctgcgcctggtcaatatgtctctgacgaaggcccgcggcgcgcaccgaccagctttggtcgatcagatgcgccgccttatagtaccaccatgtatccatagaaagctccggggcaacgcggggcagcatgctgccctttttctcctctaagaagaatttcttcataattggatcgatgcccgccgacgtgccggagaggatagatgtgctggaggtcggtgcgaccgccagcagataggcgttgcgcattccctgcaccgccaccgtttccgcaagcgcccgccacttttcggaggtataaccccgcttttcaaaatacgcgcccgtttgccagtcgctgccctcaaagagcgcatagcgacccttttcctgcgccagtgctgtgtccgccttgacggcggcatagttgatgtgctcgaacaccgcgtcggtgaaggcaaggtgctcctcgctctcccagcggatgccgcgctttgccagcatgtggtggtagccgctgacgcccaggccgatgctgcggtacttctgattggtgagccgcgcgtattccaacgggtagaaattgaggtcgatcacattatccagtgcgcggatggccgtttccaccgtgcgttccatataggcctcgtcctccaccggcagattaccgagagacaggctcgccagattgcagaccacaaactcaccggggcgtgtggccgtcaccacgaccgtgtcgccgttctccgtgtgcacctcagtgctgatatgttcgatgggtgccatgttctgcgcgatctccgtgcagaggttggaacaatagatcattcccgtgtggccgtttgggttcatacgatttacgctgtcgcggttgaaggcgaagggcgtgccggtctccactgccgagcgaagcaccagccgcacgatgtccttgacggtgacgctgcgcttttcgatgcgcgggtcattgacgcagtccagataccgcttctcccattccgtaccccagtaatcctccagagcgtagcccttgaccgtgaggatctcatgcggacacatgagatgccacggcgcgtctatgttctcctccgccagtcgccagaagagatccggatagcacacggcaggaaacacatcatgcgccttcatgcggtcgtcgccgttgttggtgcgcagttgaaggaattccggcagatcccggtgccatgcgtctaagtaaaccgccacagcgccctgccgcatccccaactgatccaccgccacggcggtgtcgttgaccagccggatccagcggataacaccgcccgccgccccttgaaagccgcggatggtgctgcctgcagcgcgcaccttaccgaagtacatccccattccaccgccgaatttagagacctttgcgaagttgtccagcgagcggtagatgccgtccagactgtccggcacagtgtccacaaagcagcttgaaagctgatggtagggctttcgcgcgttggacatggtaggtgtcgccatcgtgacctccatacggctgagcatatcgtaaaagcgctttacccaccccatgcggtcagagccttcgttcatagcaagatgcagcgcgatacccaaaaacatctcctgcggtgtttccagcggcacgcggctgcgtgtctggatcacatagcgtttgagcagcaggtcaaggccggagtaggtgaacagctcgtcccgttccgggcagagaaagccctccgccatggcgatctcctcgtgggtatagtgggcaaggatatagtcaccgtagagtcccttatccgtcagatagcgaagcctgccatagaggtcgccgatgccgcgcccctcccattcctgtgcgttgcgacagcgaaaggagtggttcagaagccgcgccgcgatgaactcccacttgggtgcctctgccgtagtcagctctaccgctgccttggtcagtgcctcagcccgctcatcctccgtcatgcccgggcgacagaagctctcaaacttcatttgaagcgtcgagagagagtagacttcctcggcaaaatccgtctggatgcggcgcagcacctcgtcaagcgagtcatcccccaccgtctgcgcgatggtatgccggacgcggcgcagcgcagaccgcttttcgcgatagaggatgtacgccttggccacctcatagtgtccgcgctccatgagcgtccgctccacctcgtcctgcacacgttccacggtgagcggtactgtgacggagagattgtcgagaacggcggcgaggatctcctccagttctccgcccccaagctcccttccctgtccatcaaacgcttttttcatggcgttgaaaattttctcctgttgaaagggaacagactccccgtttcgttttctgatctccatttcgatcctctcctcttctccggtcacttctcatgtccttttgggcagagagcgggcaagcgcagtatcacgcttgcccgctctgtttttgaaagccggtttttccgcagccgacgcggcggggctgtttgttgtctgttgtcttggttttggcttccctgccagtcacttcatagattccagaatggcgtccgccagtgcttccagctcagtgcgcttgtccgtgcccatggacgaggcgaggctgagccgctcgttgagcaccgtcatgttcttaagctcatcgttgacgaatttctgcatgaggtcaccggacttcaccgcccatgagccgttttcaatgatggcaaaggtgcggttttgcagattcagtgccttcatatccatgaggaagtcatgcatggcggggtagatgccgaggttgtaggtcacagaggccaggacaatgtgactgtacttaaacgcctcggagatcagctgggagacatgagtggaggacacatcgtacatcgccaccttgctcatgcccttatcgcagagcgacgccgccagcgcctgcgccgcgttctccgtgttgccgtacatggaggcgtagacgatgagcacgccctgagtctcaggggcatagcggctccatgtgtcgtacttttcgatgaaccagcccagatccttgcgccacacggggccgtggagcgggcagatgtacttgatctgatccaaaacgccgccggcctttttcagcaggagctggatgtgggggccgtacttgcccacgatgttggtgaggtagcggcgggcgtcgtccagccagtcccgctcgaagtccacctcgtcggcgaacagcttgccgtccagcgcgccgaaggtgccgaaggcgtcggcggaaaagaggacgccgtctgtgacgtcgagggtcaccatggcctccggccagtgaaccataggcgcgcccacaaaggtgacggtgtgcttgccgaaggagaaggtgtcaccctctttcacctcgatgcactcatgtccgtccacatggaagccgaactgccgcatgagcatgaatgccttctcgttggagatcagtttcaccttgggatggcgcagcaggatctcctcgatgcaggcggcgtgatccggctccagatggttgaccagcaggtagtccagctcgcggccatccagcacatacgtcagattttccaaaagctggcggcaggcagaccagtccaccgtgtcaaagagcaccgtcttttcatccagcaggcagtaggagttgtagcttacgccccggggaatggggaagcagttttcaaacagggccaggcgatggtcgttggcgcccacccagtagaggtcgttcgttactttacgcacgcaatacatcttatcttacctccttcacggctcaagcctttacaaattgatctttcgtctccgcgcactcgggacacacccactcggcgggaagctgctcaaagagcgtacccggcgcgatctcgccgtcctcgtcgcccaactccggcacatactcgtagccgcagccgctgcagacgtagcggtcgccgatgggggcgggcttcggcggcgtgggccgcttcatctttaccatgggcggcgcgggcagcttttcgccgctatccagcgcagcggtgagcaggggcaggatctcctccacatcgcccacgatgccgtagtcgcagttcttgaagataggcgcgttaccgttcttattgatggccacgatggtggaggcgtccttgatgcccttaaggtgctgcgacgcgccggagatgccgcaggcgatgtacagattgccggtgaacttctgaccggacatacccacatagcggttcagcggcagatatttgagggtctccgccacagggcgggaagaaccgatggccgcgccggcggccttggccagcgactctaccagtttcatgttctttttctccccgatgcccttgcccgcggagaccacccgctccgcctgcgggatgggcgtatccatagggatgcccacggagaagtcgtgaccgtccttcttcagcgccgccacaaggtcggccacctgctgggcggcatccccctcccggaagatggtctttttgcgaatgccggtgatgggcgcgggcttcttggccgccgagcggctctcgccgccggagctcttgcccagcctgcccaccagatgagaggcgatgaccacccgctggatctcgttggtgccctcgtagatggtggtgatcttggcgtcgcggtaggcccgttccacctccatgcccttgaggaagccgctgccgccgtggatctgcaaggcgtcgttggtgacctccagcgcgatgtccgaggcgtacatcttcgccatggcagactccatgccgtagggcgcgtgctgctccttcagctccgccgcggagtagatgaggaaccgggcgcagcgcagcttggtggccatatctgccagcttgaaggcgatgctctgctgggccgcgatgggcttgccgaactggacgcgctccttggaatagctcaacgcgtgctcgaacgcgccctgggcgatgcccagcgcctgcgcggcgatgccgatgcgtccaccgtccagcgtggacatggcaatcttgaagccctcgccctccttgcccaacaggttttccttggggaccttcacgtcgttgaagatcagctccgccgtggaggaggagcgaatacccatcttgtcatagtggtcgccgaactcaaagcccttccagcccttctccacgatgaaagcggagatgccccgggtgccgatgtccggcgtggtgacggcgaaaaccacataggtgtccgccttaggggcgttggtaatgaagatcttgccgccgttgaggaggtagtagtcccccttatccagtgccgtggtctccgtgccgccggcgtcggatccggcgttgggctccgtgaggccgaaggcgccgatcttctcgcccttggccagcggaaccagatatttcttcttctgctcctcggtgccataggcgaaaatgggccatgagccaagggagacgtgggcggagaggattacgcccgcgccgccgtccacacgggccagctcctccaccgcgatggcgtagctcagggcatccagaccggcaccgccgtactccttggggtagggaatgcccatccagcccagcttacccagcttcttgacagcctcctcgggaaactcattgttctgatccatcaaaaacgcgaggggcttgatctcctcctccgcaaaactccggatcttcgtgcgcaactcttcgtgcgccgccgtggtttgaaacagcatacgggtacctcctcttaaaattttacagctcgcttgtatcttggggatcggatccgccggtcagcagcctgcgcaggctcacggcacggaacgcctcgtcctgcttttgttgcaaggccgccagctgacagtggatggcgcaccgcccatgcttgtcctgccagcggcattcatatcccggctccatgcaggcgcacaggatgccccgctcccccatgacccccatgagatcgtagagggaggtcgcgcccaggtcacaggacagttcgcagccgccgagggcgccgcggctcacccgcaccaaattaccggcagagagtttgcgcaggatctggtaggcaaactgagtggggatcaattccgtttccgacatctcggccaccgaatgtttctccccgtccagcagcacccgcaaaatgcgcagggcgtagtccgtctctttggtgatgatcatgctccgcatcctcttttcgcttgcttgttagtgccatcatatcaatcttgacaaaatttgtcaagataatttccaaaaaaatattgctttaacacagaccgccccagcccgggtcagcttcgctttccattcagcgaaaagccatgttccttccaattatagaagccgaaaaagctgtgccgtggcagtccgccgaaagcagaaaagaccatgactgaaaaccagaaagcaagaaatcggttggggctcgcaggggtcgcccacccaaggcggatgtggcgatccctgacaagcctaagccatccaaccgaaacaagcaataaagtgcgtgcttttcattttatattcgacgaattaagttaatgtgcactgaataaaagaaaaagccttatatttcaatccatagaggccaatctgtggtataattggagcaagagaactggcaaaaatccagcaaaaaccttgtacctggagggcaactatgtatcgttacagcaatggccagatcagcttggcggattaatcgagtatctaaatttcccccctgctgcggggctggttttttgagccttgctacaagctcaaagctcgtttaatgctcaaaaacagtagaatttcatctgcacacgaaagatagatgaatagctgaacaacaaaatgtaacttttgtgacctacgacaccagtctcaagcggtctaactaatgtccactgaacaagtgcccaatttttgttctgagccagaatctccagaagatatgcgagcattctcaaaagagcacgctggatcttgcggagattcagcaccagaacggacatggcgatcacatgagccgcggtctcccgcagcttcgcggcgaccagcaaataatattgctcgtttaccgccggatccatttcagaagctgaatcaccagcatagagccaaacgccagtcccacaatggcaccgaccaagccaacagacagcggcgcaattgcgaacagcggttccagcgcaggaaccagcagcaccagccccagcagcagagcgccgatggtaaaggcccctaacagggcacggttgttccagaagtgccgggtaagcagcaccggatgctgggatttgcagctaaatccgtggaacagtcggctcaggcacagggtggagaaggccatggtctgtccagcagcggcaccgccggcgttcagccccagatagaaggccgtgacggtggcggcggcgatgaccagtccctcgacgcccacgctataaaggaagtgctttgtcaggatgccttcgttccggggccgtggcttttcagacatgacctcgtcggtgtgtggctccatgccaagggcgatggctggtagggagtccgtcagcaggttgatgaacagcaggtgcactgccgcgaagggcacgggcagtcccatcagagaggcgtagagcaccgtcaaaatgcccgccgtattgccggagagcagaaattgaatggcccgcttgatgttggcatacacgttccgaccgttttttacagccttcacaatggtggcgaagttgtcgtccgtcagcaccataccggcggcatccttggccacctccgttcccgtgatgcccatagccacgccgatgtccgcctgcttcagggcgggagcgtcattgacgccgtcgccggtcatggctaccagattgccccgctgctgccacgcccggacgatgcggatcttatgctccggggacacacgggcgtagacgctgaccttcggcacaaactcctgcaattcctcgtcgctcatgctgtcgatgaccgcgccctccacggcctccgtgccgtcccgcaaaatgccgatctcacgggcaatggccgccgccgtgattttgtggtcgccggtgatcataataggacggataccggcgcggatgcactccgccaccgccgccttggattcctcacggggcgggtccatcatggcgatgaggccgaggaaagtcaggctgttttcatccgccaaagtgatggccgggccgtccacgctgcggcaggcgaaggccagcacccgcaggccctcgttggaaaactgttcgttgacctgttcgatcctcgcccgttcctccggcgtcaccacgcagcggtccagcagcacatccgtcgcgcccttggtgaccagcatcaggccacccgccagctcgtggaccgtggacatcattttccggtcggaatcgaaggggatctctgtcagacggggccagcggttccggacgagatcctcgtcaaagccgttggtctcccccagccgcaccagtgccgtttccgtggggtcgccgatctccgtatccccgctgatgaccgcatcgctgcacagcagagccgtccgcagcaacggctcctgtaacgggtcccggaagtccgcgtccttggcgtcgatcacctcgcctccggtgtagagcttgcgcaccgtcatacggttctgggtcagcgtacccgtcttatccgagcagatgaccgacacgctgccaagcccctccaccgcctgcaaatggcggatgatggcgtgttccctggccattttccgggtgccgaaggacagcacgatggtcacgatggagctgagggcctccgggatagcggccaccgccagcgccacggcgaagagaaaggcgttcatcacgttttcgtgccgccacagcacactgacgccaaacagcactgcgcagatcaccagaatgatgatcgacagctttctgccgaactggtccagactgacctgaagcggcgttttccgctcctccgtgtttttcagaagctgggcgatcttgcccatttccgtgtccatgccggtggccgtcacaagaaagcggccccgcccataggtgacgaagctgccggagaacaccatgttcttcctgtcgcccaaggccgtttccccactgagcggctccgtatccttttccaccggcaggctttcgccggtgagggcactctccgcgcacttcaggctggcacattccaacaggcgtccgtcggcacagacggaatctcccgcctccaatatgaccacatcaccgggaaccacctctcgaccggggatctgtacgatctgaccgtcccgcagcaccttggcggtgggagcggacatctgcttcaggctgtccagcgatgcggaggccttgacggtctgaacggtgcccagaattgcgttcatggtgatgaccgccagaatgacgatcatgctctccacgtcccccatgcaggcggagatgacggcggccaggatgaggatcaacaccagaaaatccgcaaactgccccagaaagatctgcaaaacactcttttgcttgccggcgtgcagttcattggctccgtattttgccagacgatccgccgcatcctcctgcgataggccggtctcccggcaatccagtttctggaacaactccacgcgggactgttcccaaatgttcttttcctgcttcatgtactgtgtctcctttcggcggacgcaaaaaaggcgagcccttttgcgtcaatgccttcacattgatacaaaagtctcgccatttcaatccgcagcggagccaaacgacccgtactgacgccaacggatacacaaagctgtgcaagctactcccttttgaacgaaggatacaccattcttttcacattgtcaagaaggacgcctgctaaaggacgttgagaattgtacctgtacagattcttacaggtggaagtattttccagcttttgattttctcccagcatcagcaaggtcagacttccgtccagcatggtttccggtgagatgtttacatcggttttgccatgcacacctccttgaacggatggtactctcaatttcccgtacagtatagcacggtgttggagatatgcctgcacagccgtaaaatttatttcatataatataatgtccactgaacaagtgcccaatttttgttctgagccagaatctccagaaaatatgcgagcattctcaaaagagcgcgctgaatcttgcggagattcagcaccagaacggacatggcgatcacgtgggtctcagtctcccgcagctttgcggtgaccagccccatgccacatttacgcttcgccagactgaatctgcgctccacttccacgcgctcgcactcatcccgatcgtcctgagccttgtctctggtttcacccttcttaggccgccccagagctgggccggaaaggcggatcccatgcgccttgcaatagctgagattctcccggtttcggtagattttgtccgccaggatccggctggggtaatgcccctctcgcgctcgaaaccgctctgtcatttcccgcagatttcccgcctcattgtaggtgtcaaaagaacagcactccagccgcgtccatccgtcaacgacactgatgtccagcttcgcgccaaactccaccggctttcccgcttttccccgcacaatgggccgaacaaagggctggctcacgctgacgatccggttaggtacgctgtgggtacggttatcgtacatgtacttctgctgctcatagacggcgcggatcgtgcccaaacgctccgcctggcgagggggcagattttttccgagggacagtttgccatcgatggcatccaggtcgcgccggaggtaagccaactgctttccaatggctttgcgggtcattttcgcggtatgtttacggcatcttgtgtatttcagggaatctttccgggcgcgtttgcggtaggttcgaggcttctttccgtccgcgggatcgtgaagaacgtccaaaagcttttcagcgttctccctggcctcgttgagcagggaaacatcctgaggataacggatattggacggcgcgcaggtggcgtccacgatcatagtgccgctgtttccgccagttcccggctggccgtcagaatcatcatcgtcatccttggattcggcttctttgacctgacgctcctttgcgtcccgcacgatcatctcattgatctcacccagcacttccggcatcaggcgcttgcggaaatacaccatcaaagacgggtcaaagggcagcttttcgtcatcatagccaggatacccgcagaaatactgaagatatgggttttcctgaatctggagcgcggtttcctcgtcagaatagccatactccgcctgaatgatgcaggcacccaaggccagacgcagcggcttggccacattgcctttccggttggtgaatagtacggcgtagcgcttctcaatctccagccaggggatcgtctgggctttctttacccaacggttgctttccttcagattcatacccaccggctgtttgaaatccgccaggctgatctggccattgctgtaacgatacatatgctccaattataccgcagattggcctctatgggttgaaatataaggctttttcttttattcagtgcatattaagttaggatgtgcagtaaatgctccattttgctgtcccactctctgctggaatcggcgcactctttcagttcggtttcgatttttgtatttatcggcagatttttcttatagcggatggtgtgctcaaggcttgcccagaagtccatagcgattgtacggagttgtatctccaccggcacacggatctctttttcagcaaagaataccggcagccggatcgttaggtgcagactgcgatagccatttggcttagggtgtgaaatataatctttctctgtgataatttcaatgtcagactgttcttttagacactttgccaaaaagaacacatcctcctcgaaagagcagatcacacgcacaccggcaatatccatgatatttgcctgcatggtcggaaaatccagagaaagtccgcgcttctgcatcttgttcataatgctggacggcgacttcaagcggcttttcatgctttctatcggattgcggtcatgctgcaatgaaaactcttcgttcagaatttccaacctgctttcaagcgctttcagcgcacagcggtattgcagcatgacttcctgatacctgcgattttcacttaaaaggcgctggcattgcagatcatccaagcctttatctgccgcaaccgtcaaaccaaatagattttcactcatagcttctccattccacagggataggcgctccgcactgtctgctgctcttttgttacgacctgataaaagctgtatccgccggagagatgggcacaggtgaagccgtactgcgtcaaaaggcggcaggccagataactgcgaagcccagtctggcaattcacatagataggcttgtcccgctctaactcgtccaaatgctcccgcagatcgtccagcggaatattgcggaatccattcaagtgcccacgccgatattcgccttccgtacggacatccagcagcgtaatgctgccatcgtggggtaagctttcgacatcactccaatgaaactgccgcaccttcccgccctccaaatcctcgatcataaagcctgccatattgaccgggtctttggcagaggaatagggcggcgcataggaaaggtcaagctccgtcagttccaaagctgtcatttttgcgcgaatggccgttgccagtacatcaatgcgcttgtccacaccgtcgccgccaacgatctgcgcacccagcagccgcaggctttctttttcatacagtaccttcattgtcatagaccgtgcgccgggataataggcagcgtgggatgccgggaacaatacgactttgtcgtaagcgatccctgctgtctgcgctgccttctcattgatccccgtagaggccgctgtcaagccaaacagcttcagaacagacgaaccctgagagccggtaaagcggctgcttccgccgcagatattgtcagcggcaatgcgtccctgcttgttggcaggccctgccagcgagatcaacgctttctggccggtcacgaaatgggtgacctccacagcatcgcccacagcatagatgtccggcacgaaggtttccatccgctcgttgacagcgatgctgccacgaataccaagcctgagtccggcttcttttgccaaatgcgtatccggggtaacaccgatggccagcagcaccatatccgaatgcagtggctcactaccctccaacagggtcagcacggaagctccgtcctgtcggaatccagtgacggtttcacccaaccgcagagtcacgccgtgtctgcgcatttccgcatggacaaagctcgccatatccgcatccaacggcgctaatagctgcttcggacgctgaacgatggtgacggaaacgcccatttctgcgaggttttccgccatttccagaccgataaagccgccgccagccaaaacagcggttttcggcttctgatcctctacaaagcgactgatgcggagggtgtcctccactgtgcgcagggtaaagacccgctcgctgctgatgccggaaagcgcaggaaccgtcggctttgcgccgggggcgaggagcagtttgtcataggtttccgtataggtcttgccgctgtccagcgcgtgaacggtgacggttttctctgcgggattgatctcagttacttcctgacgtacccgtacatcaatgcgaaagcggtcccagaagctctccggagtttgcagcgtcagttcttcctgctccttgatcacaccgcccacataatacggcagaccgcagttggcataggacatatagccgctgcgctcgatcatcacaatttgcgcgtgttcatccagacggcggaggcgggcggcggcagacgcgccgccggccacgcctcctacgatcacaactttcatcttgcgccctccaccatggcggcgatctccgacttaggccgatagcccaccgatctggcaacggcctttccatccttgaatacgaccagcatcgggatgctggatacctgaaaacgcatcgccagttccatctgctcgtccacattgaccttgcccaccttgagggcaccagtgctttcctcagcgatctcgtggagcacgggagcgagcattttgcacggtccgcaccagtctgcgtagaaatccagcaggacgggcttgtcggaacgcagtacctcgttttcaaaattcgcagcagtaattttcagttcagccatgagaaaggctcctttcgtttgtatattgtcagtctttgtttttcagcttgcaaatactctgggtcatagtccccatggggcagaaggcgcaccatgtacggggcttgtagagcaccatgacgatgaggccgatgagcagcgaggtcagcatcaagctataaaagccgaagctgaactgtgccacccaatccgtcaccgtcccggcggtgtaggcccagtcccacggcacacggaatgtccagaacagcttaatggcctcccgcagggacgcggcccccgccgccaccagataggtttggaacaccatgttgccgaacatcgttaggaaaaagatcaaaaagccgtagcggaaccactttgaggacatccagcggggcgtgggcttgcagcgggagcatttaaggtctgtccccagcttgctgaacagttgaccccgtccgcagaggtggttgcagaaaaacttgttcccgccgaagatggctaagaacagcggcagcaggaagtcgatcatgcccagccacgcaaagaggatgttgaaaaagccgagggtgaagtagaggatggcgcagatccagagatagtcgtaccaatgttttgctttcttcatgcctcgtccctcgctttcacctcgatgcagcccacgggacagagcctcgcgcacttgccgcagccaacgcagcgttccgcctccacggcggcgtaacagccgcggcgcaccttgacagcccccaaggggcaggtattttcacacacgccgcaggcgacgcatcgcgtcgtgtccacggcggccaatcgttttgacaacacggcgttcccccctcagtccttcagggatttgtagtagagcatacagtgacagtagccctcgtaatcaggatcggcaatctggtccttaaactcctggcacatacatatggttgcctctgtgcgttctctgcggcagggacagtacccgccggtgcgcttgagtccttcccggatggtattgacaatctcctgatcgggattgagcttgattttcatgttcgccacctctttcttgattgtggctttatcataccgcaggacaaagcatttttctgtgacgaggttacgttacggcaaatttttatataagcgagaaagagccgtgaagcgggatcttacatactgcttcacggctctttgtttataggttttgttgtgcttccttactcagccacagaaaactggtctttgccaactgaacataaggggcattcaaaatcattcggaatatcttcccattttgtacccggtgcaatgccgccttccggatagcccttttcttcatcgtattcccaaccacacacatcacatagatatttcataatgaaattctcctttgatgttttttatttcgtacacaacattggcccgactttatcgtcatcagaaacaataacgattcctattttactcaaagaatatccacagcttccgcttgttttactctctttgttttcttattccctgaaatcattttatgacccgtatatactgccataaccatgcagatcaaggaactaagcgcaaagtacttatgcgctgtttttgagcctttatatccagtgcaaaaagttccaaacatggtaattaccgctccgattgaccaatatttatgtgctttcatgacttgtttgcctcctgcctgcaatacatgacattcagttctctatgttggttctaagatgccatgcgcggaacgatcacgctttccacagactatggaggttgcagtatgcgtagaccgcctcaacctcatcaccctcgcagagtgcaaagcagacctcgggcttctcgccggggtgcagctccttgcgctggttgccctgcttggtgtggagagagacccactcgatatagtgctccggcagcatgggatgctccacagagccgaccttgacgtggacgatgccgttttccaccgtccagacagggacgtgcttttccacggcggcgtcggtggtgccgggaacgatctcgctcatcggctcaccgcagcagatgacgggaacgcccgtatccttgaccttggcaatgatgttgccgcaatgcttgcaaatgtaaaacttctgctccatgatgattctccttttctttctttaatagttttctgcgtgaatttcaaaatagctctggggatggttgcaggcggggcaaacctccggggctttctcacccacgacgatgtgaccgcagttgcggcactcccacaccttgacctcgctcttggcaaagacctccgccatctccacattgtgcagcagggcacggtagcgctcctcatggtgcttttcaatggcggctaccaggcggaaacgctgggccagctcatggaaaccttcctcatcggcggttttggcaaagccgtcgtacatatccgtccactcgtagttctcgccctcagcggcggcgagaagattttcggcggtgtcaccgatgccgttcagctctttgaaccacagcttggcgtgttccttctcattatcagcggttttgaggaacaacgccgcgatctgctcgtagccttccttcttggccttggatgcaaaataggtgtacttgttgcgtgcctcggactcaccggcaaaggcggccatcagatttttttcggtttgggtgcctgcgtacttcgtttccttcatggtcgatgctcctttcagcttcttttgctcatattataacacggattcgtgttaaaaacaatattttcattttaagtgattcaatccttctgtatcccgcagcgtgatcgcaccgcgcttcagctccaccagtccgtcctccgagaagcctttgagcatccgtgccaccgcctcccgcgccgagctgatgtgctgggcgatctgctcatgggtcatgcgtatcgtatcagagtcggtacgctccgcttcggcaaggagaaattctgccagccgccgatccaatcccttgaacatgatctgctgcatcgcccacatcacatcagaaaatcgtttcgttgccagctcatagaggaagcagcggacatgaagattttgctccttgagcacagcgatgacatttgcagggataatcagaacctccgtatccattcctgcggtcatttgcgtatcaaaggtaatctgactgatcacgcaggaggcagaaagcacgcacagttcacccggatacaggcggaacagcgttatctcccgcccctcctcggagagaagataggtgcggatatcaccggaaaggacgaacagcattccgagacattcattgtcgctgctgtgaacaaatgcgcccttttcataatgacggacaaaggcgcttcggcgcagcgtttcttgctcctgttcagtcaaggatgaccagaacggaagttgtgtcagtgtgcgttccatatcaatggcagctatgattgccgcagccgtggtcaccgcaggtgtgaccagcttcgccgtgctcgtggtcatggtgatcacagtgaacattgggatcgtagcccagatttccgctgagcaatgcgttcaccgctgcgtcagcgtccccgctgacaccgccgtagagcttgatgcccacttcggccagagctgcctgcgcaccgccgccgatacctccgcaaatcaaagtgtccacgccgtgctgcatcaagaagcctgccagtgcgccgtgaccgctgccgttggtatcaacgatttccgcatggacgattttgccgtccacagcttcataaagcttgaactgctcggtgtggccgaaatgctgaaagatttgaccgttttcataggtgactgcaattttcatagtggaatctccttcgcattttttgttggatttttctgtgttggctctctgcatccggcagcagcggccacagtgggctgcctcctgtcctccgcagatgcggtaatttcccccggtgatgtgcagcggtttcccgtggacaagacacgctgcgatcttgcgccgtgcgcttttgtaaatctcctgcacggtcgagcgggaaatctccatttgcgcggcacactgctcgtgggtttgctgctccaggtcaaccagccgaatgacctcgtactcgtccagcgtcagcaggatcggctcggcatcctcgcacccgttggggcagaaggtatcaacttgcggtgcgccacaaatccgacggcaccgtggcggtcttggcatggacgcgcctcctttgttttcggtatatgccgattataccacctcgcgcagaaaaatcaatacagagttttcaaaagccgctgtaacgcttatccgataacgggatgaaaaatacaacggcttgcggttattcaccgaagttgctgagatgccttcatcggcatagatgcgaaccagcgtccaattcgggtgcttggcaatgaactcgttgtagtactgttgctggatctcaaaactctccgcctgcatttcggacatcgtactgactcggcagtacggagcaacccgatagataacatcgtcggaatgctgaggggccatgtcctctcgggcaggcattcgctctacttgttttccatcatggaacgcctcgcggatcctttgcttgcgatcctcgtttttactttcctgggccaagatcgttttctccttccttatggtatctggaatagaagaaggcgtgaggtggggccagctggatctttccctgaggggtatagactctgatcccatgccggttcagcttctgtccaatcaaggtgcagccctcagcgctccttgataatctggatggatcaacaatcagcacgcaatcatagacgccgtgctttccatctcggatcagcgttttgatgctctgacgctgcgggtcagtgccactttcaaaaaagtcacttctgccacgacggtaaggccgagatcctcagcagcctttcgcagcatctcaagctggctgttcgtggctatttggttgggttcatttgcggtgccgccaatgcggcaatatatgcaacaacgactcatttgctttcgtcctccaattcatatttccgtacaagacggtagaataaagctatacagatatattacagtttgatttttgttaccatattctcttactctttgaggctcagtttgtaaatgtgacttaaagcgaatggccttcggtatgtgtcgtaccggaggtcattcgtttacgtaccatttcagtacggtaaataccataatgctcatttctgattttctgccatccatctatactgtgagaaagtacaggataggtaggagaagatcaaatgagtacgagattgcaaatcatgggcagccggattcggactgcacggcagttccgccgcctaactggtgaacagctcgctgagaagattggtattgctgtagactcacttcgacacatagaaaacggagtcaggtcaccaagtttccagctcattgagcgcatctcggatattctagacgtttcactcgactacttagctgggaagacggattctcctctggagcatagagttcgcaaggaacttgaaaactctggactaacgaaggagcaagaagatgccattgttgagttggcattaaattcgatcccgatcatcaaaaaacacatttgagcaatgcacctgtcgatctggcaggtgcaattttatttttcattctcccttaatccgactgttttcgcactttcactcatgtaatatgtactcacttgatacgattgtatcaaatctgtacggatggatgaagacatgacagtacaaaacgcattagaggaaatgaaaggacgcgcatttgcccctgcttttcaaaagtatttgctcgatacatacaaggtactggcgcaaacagatttttccgaagatgaaaaggattacacagcggctgaggactatttcaccaccacattggagcagtccgagaacgagatcctaagccagatcaaaaccaattacgaggcaaaactgcggtatgcatcccagtatgctttcaacgccggcctgtattccgggttcgtccagcgcttttccaatcaagatcttgttgtcgatggatttgaaaagcatctcatgcaagatctctttgagatgccgggtatgcagcgccatactctgtttttgaagatgcatgacgaaaacaagaagcttatcgagcagctcgagattgatggtgatgaagagcgacgagagcatttgacctcgatcgagtgtgcgtgggagcagcgcgttcattgggcggcctgccacagcttctactgcggttatcgtgctgcggtcaaagtccttactgctgtcgagggcgtgagcacctttgacatggtcccacacactctgctgttggaatatcacttgggatatacgaaatcctatgaccaaacggaacagcagcatattgatagatagcggagttgaatggcagtagcacaatacaaaggggcaattcaatagattctcaatgacttcacatgaatgacatgaaaagacacaccaatctgcgggaatgatttatcccatagattggtgtatctttcacttcgactatgatactaaaggctgcgaggtgtccgttctttcggacacctcttcttgtatgcttgcggtagaattcgaagaaagaactaccggaggtgtcgaagatgtatgtgctcgttgatatggaatggatctcgaatcagcatagaaactatggaaaaactccaactatacagccttcccctgtgatgctacaatgaagctgtatttcagggcgaagtaagttagggcggagtaagttaggaaagaaagagtgaaaaggaggtagtatgccctttgcacagctcatggcggttttaccgcttagagatgtggcatgctccttgcgagtaccgtcgaacccaaacggcttgaaatataataaggacgagaacgaaaccgtaattgctcataggagtgattgcggtctttttttgtttcgtcaaaagaaaggagtcaggcaatgaatgtccaatagtaagctgatcgaactgagttactatgacccatccgcacaggtgcgcttgtcggcctatgcggatacgatagtgctcgaccacgatcaaaacggcagcatcatcagtgccatccgctttggcggttaccccgaaatggtgcgggcaatggcagatgccatctacggcggtgcaacgatagaagccgcccaaaacgacacgacccgaatgctccagagcagcctcaaaagttatcagcggcagatcacgcacgatgggatctacgccgtggcaacattgatggctgcggacaccgtacaggaggacagaagcggcaagcatgaaaaagacgaggatacaaacctcgtagatacggagcagatggagctgcagccccgcaggtgctatatcttctgtcccaccggggatcaaagacggctctttgaggaactggatcgtaaaacggcagcgccgctgatcccggaatttcaggattatgtgctcaacagtctgcgccaacggggagatctccggcaactggaggtcatttccctgaaagagcggatagatgcatgggtgctggatctgaagccgcaggatcagaatgtggtggaggtgctggagcagggcttgcagagcggagatatccagatccccggggcagtccccaatatgccagacggttttgaaaatgtggaaaatgtcacaggctatctcaatacctttggcgttaccgtagctgaccgtatccgcaatcagttcatgcccctttttgatcctgccaaggaaccgctttccgatgaagtgctcgctatcaacgactgcatcatgagccgtgtgggatattctctctacgatgcgcagcttgcggtggcagaagccgtcaagcggcagcttgcgcgtaagcgtgtggcgctcattatcgcagaatgcggtagtggcaaaacgaagatcggttcgactgctcttggcgctttgcacgggctgtgggccgatcagaagcggaaagacggcaggaaatcctttggcatcgtcatgtgtccctcccacgtcacacaaaagtgggtgcgggaaattggagaaacgctcccagatacctacggcatggtggtgcgcacgattcaggatctcaaccgtctgtatgcgatgtacgagaagggcgacaaaagtgtatttgctgttttttccaaggagcaggcgcgggatggctatatgcgttaccccgccgtgcgttggaatcgacgcagacgcgcgtttctctgcccagactgcgacggtgtgatcgaaatggagatcagcgaggacggcagccgctatacggtgccggccgaccagttcttttttcagaaggagcacaagaaaaatcacacctgtccccattgcggtatgccgctatggtctgcggtcaatccggacaagcggatcgactgggtgaagatcggagaatacggatgggtctaccgctacggcgcgcaggcacatctgcatcgtaccaaaaacgagcgtgttctcgatcagctcactgagatcgcccaaaatccggatgcattctacccgatccgcggagcgcaccggcggtttcccctgagtacctacatcaagaaaaagctgcgcgggcgcatcgacggcttcctctgcgatgagctgcacgagtacaacaacaatagcgggcagggcgatgccatggcagagctgtacggcgcgtccaggtgttttgtcggaatgacggcaacgcttatcaacggctattcctccggcatttttcacctgctctaccgcattgttcctgggctgatgctcaaggatggcaaacgctacaaaagccccggtgattttgatgcggagtacggcgtggtggaaaatacctatgagatgcaggatgcggagtacaattccaaccggcgtaccagtaagcgcagaacaaagtcaaagcagctgcccggcgtatcgccgctggtattttcccgtttcctgctggaatacacggcatttctctccctctccgacatgggcaaagacctgccggactacgaagagatccccgtaccgctggagatgccggaggatgtacgcacggcctataaagaggcggaacacgaattgcagaaagtcctgcgcacagaccggaaggcggcgcagaagatcctgtccacctatctcaatttgctgacggtttacccggatcagccctacgatcaagcggaggtagtgcatcccataaacggaatgcccattgtaacgccaaagaactgcggcgatttttcccgcctgtttcccaaggaggaacgggtattggaactggtgcggcagaaggcggcaaacggagagcgcgtgctcatctataccagttggacgcgcacggattcacagaaaaagctccaggagcttctttgctcggaaggctatcggacagaaatcctgacgccgcagatcgctacggataagcgggaggactgggtcaacaagcgtgtcaagaacggtttgcaggtgctcattaccaacccgcgctgcgtggaaaccggccttgacctcaatgcctttaccaccattatcttctactccatgggctataacctctttacgctgcggcaggcatcccgccggtcgtggcggatcaatcagaccgcccccagagtggaggtatatatgctctactacgccgataccatgcaggcaaaggccatgaagctgatggcctccaagttggcggtagcaggcatcatcgaggggacattttctgaagagggccttgcggccatgagtgatgtaaaggatctgacctcacagatggcaaaggagctggcgctggggatccgggataatgtggaggatattgcggcggcctttcggaaaatggcgatcattaacccggagcggaaaaagaacatcgcagctgcgcagctgaaagagactgcggcagaagaacaaaaggcacccgcagccaaggattccttcggcgtgcgcacggcgcaggcgcaagtgcgtcaggcactttatgaaggactgcttgccaggactgcggaagaacagaagaaacggaagtcgaagaaggcagaggtggatgaaaaccaactgtcgatcttcggctttgctgcgtaaaggaggagattatttgaatgtaacgatcaatcgggcggaaatgttgagcgccatcaagcgtgcgtcagccatcgcaccggcagattcgccgttggacgtgcttcggggcgttttgctggaggcggatgccgccgcaggaaagctcaccgtcacctcgactaatctggaagcggcactggaggaaaagctcccctgtgccgttcaggagaatggggcgctggtatttggagcgaagatgcttgcagaaatgctctcacggctgccgcaggataccgtgcagctctgtcgggcagaaaatcagggacgcatgacgctcagaagcggagacgcctgctatgaagtggatgtatgggagcgaggcgcttttccaaagccggatcttccttttccggaggataccgtcaaactcagcgggattcccgccatggcgcagcacaccgtatttgcaaccgcacaggataacagcaagccgcttctcaagtgcgtcaatctcatgtttaccagcacgggactgcgcgcggccggcagcaacggaaactgtatcgtgacggccagaggcgacaatcagagcacgggtgatgtgagcctgctcatccccgccgcctcgcttggaaagctctcgaatatgtgccaggacaaggatgaattccgcgtcggcaccacgggaaagagcatcgtctttttccgcgagaacttccttttcagcgcgcggctcatggagggcggctacatcgatacggatcagttggtaggcagcatccggaatgcgtttaccgtgctgacggatattcacgacatgagagcggcgctctcgtccgtcctaagcattggtaccggaaaccgggcaaagctgagctttcaggatcagcgccttgtattccaatgcgcaggcgattgcgtcagcgcatcggtgcccattgaggtaattgcattgaccggcacccctgcgggagattactggttcaacgcaaagcagcttgtcacctgcctgaaagccttgagcgggacagtcacgctggggatcgcgcagggcggaatgctgacgcttgccacgcaggacgcctactatctgcaaaatgccatgcggccggaagcacagaagaaaactcaaaaagccgcgcagccggctgctgcgaaagcggcgtaaggagggatgcctttggtagagattccgacgatctgccgctattgcggcggcgcagtccatcttgttcccgcggcaaaggtttatggtcccgcggcggcaaaacgactgggcttggaacgtgagaaattttatcaatgtcagaactgcaatgcccgtgtgggctgtcataagggcagcacgcggccgctgggcaatcttgccaacgaagcccttcgcatgaagcggatggagacccatcaggtctttgacagcttttggaaggagcggggcatgagcagaacgcagggctataagtggatggcaaagaagctgagactctctgaagagcttgcccacatcggcggctttgagatggatcggtgccagaagctgatccggctatgcgaaaaggaacgaaacaaagagaaaaagaaggaggcagcataaatgtgtgagagaacatattgccggcatgagcatgagagactttgctcgtgtccgccggtcgcttgcagggacgcccttggaatggccgcgcatttggcggagaacatggagcaagtccaatggagcctgacctacaacagcctgaaggagataaagccctatcagttgtgtctggtcgggaaatgcaggatctgcggcgggcggctgtgcatggagcaaaggcgcgttgaggcggatagcactgacggtttccttgctgcggtataccggcatttataccattttcaccgctccatcggtcaggacttgcctcgtgcggcgtttcgcacaaagtttgtagagatgttccgtaaggaggaccgcgccgctgttgaggactggctgagcaggccggaaaaccagtcgatccatgccatgatctgcggaaatgcgaagagagtctataccatcgtccactcctgggcggatgcggatcagggcaattttcctgctccggaaggtatggcagccttcacggtgaaggaggaggcccgcaaggagcttgcgcgccttgtgacggaggaaaaggaaaatcggacgatcccgtttccgacagaagaatactgtgaggagtacggcgaggatttctgggaggcttaccgggacggctatgccgccggatggtttacccgctatgagatcatcgaaagtccgctgtacgcagaaaatatcgaagaaaaaggaggtgcggctgatgatgctgcgaaaaccgacctgcgctgattgcccacataatctccaatacatggaaagattgccgatcaagaaaaagggcgtcaccatgcacttgggggagcgtttctgtgttgcgggaaagcgcgcgagaaaattcaaacgcagtgatcccaaaacctatgtgccaagctggtgtcccaggctcaaggctccctgtgagctgcggatctatggcttcaagaatcagcgtgaatggaggatgcaccgcagtatgtgcgcggatctgggcgaggatatttctccatctgcattccgctatgcggtgcgctatgaaggacataccgatctggcgccgtatgagtttttcgagtgctgcaatgaaaaatcggatgatgagattttgggtgcagcagtccagcactacgatgttgtggaaattgacgacggtatcaagcctgcctttttctacaaaacggagcatggctatgagcttttattctcgtttgatgccaaaactgccaagaagaatatcagggaggaaattgattgaaggaaactgcaaaaagctgcagtaactgccgatattcctatgatctgccgagcaatcgcggaccgatggcaaaaacgcagtactgtagaaacaagaactataattccgtgaactacaccaccaaaatgttgctggaggactgggaccaaggccactgccgcttttgggcgcccataccagaggaaggaaacgacaatgaaaaataattactcaatcgctcagcgcaacgccattgtggaagcgaatctttggtgcatcgacagtgtgatccgtcagaatcgcccgctcatgagagcggctcggctggaatatgacgatgtgtaccagcagcttgccctgcggcttatcaaggctgtagcgggctatgacccggaaaagggacgcctggagcagcacattttcgcccagctcaagtatgagcttcttagctgcaaatcggcctaccggctctgcggtatgaccggcacaccgcactcgttccgaaagagccatatcatttccatcgacgcgctctatgaggacagcagcctctatgaagagacgctggcggcgtaaggaggcacggaaatgacgctgagagataagatgctggcggtcattgcggataccaatgatagcgtagctgagcgggaggaattggtggagatgatcgccatttccctgctgacgcgaaaaaacctgtttgttctgggtgagccgggacaggccaagagctatgccatcaacctgttccgccggcacatcaccggtgcgcggcagtttgagcggcttctttccaagcagagcgatgaagaacagcttttcggccgtgttgatcttgcgagtctgctgccgggctctgtgccgcaaactgtgctggagcaggacgcgacctatcaaaaccagcgcttcaacctgcgtgtcctcgtcgagggcatcggctccatgaaggacgagcccgcaacatgggaaaagctcaagagcggcaccgaaaagctggagctttatcgtgcagcgctatcggcgcttcacaaaagcgagcccgcggtgcagacagccggcaaaattccagaggccgatatcgtattgctggatgaggttttcaagtgcaacgacggcgtgctgaactcactgctcaccgccctcaatgagcggaaatacaccaacgagggacgcacctatcccattccggtgatttctttctttgcggcctccaatgagatccctaatttcaatgacccgcaggaaaagatcctggaagcgctgtacgaccgcctggagctgaaggtcgtgacggccaatatggaggatcgggacacgcgccttgccgttttgaagaataagcaaaccggtgccttcgggcagatctccgccacgatcacgttggaggaattgcggcaaatgcagcaggaggtcgcgtcgatccccgttcccgacgccatcaacgagttggctgacgatatcctctgtgagcttcgtaaggatatggcggtgtcggaccgaaagtatctgggctattatcccatcgcgcaggccaaggcatggctttccggccatgacaaggtagaatcctgtgaccttctggcgctgaagaattatctctggcacctgccctcagaccgtgaaaaggtggaagcggtgctcacccgcctgtgcgtcaaccccatgcaggataaggtcaacaatatccgcggtatggcgttggaatcccaggaggaatttgacgccgcgctgggggatggcagcaaggccgatactgtgcgcaaggcatttatcaagctgcgcggtgaattgacgcatctttatcagatgcagtgcagccttcgcacggcggcgcagtctgacagcgagattgcgctggtggatgacctcttggccgatttggagaagatcagccgcaaggcccacgagcagacacattttacttatacgacgctggaagagatcgcagcgttaaattaaagaatattggaggaatcacgatgctgaacaagatcattcttatgggaagactcacgcgcgatcccgaactgcgcaggacggagagcggtaccgccgtttgttcgttttcaatcgcggtggatcgggacttcaagtccaaaaacggggaaaaggagacggactttattgatatcgtttcttggcgcgccacggcggagtttgtgagcaagtatttcacaaaaggccgcatggccgtcgtggagggccggctccagatccgcgactggacggacaaggaaggcggcaagcgccgcagtgccgaagtcattgcagacaatgtctacttcggagattccaagccgaaagacggcggtgaggaggatgatattcccgcctataccggagcgcccgacagctttgccgtgccggacggctttacaccagactttggcggcgaatccggggaaatgccattttaagagcaccaaataagcgagggggggcatcacccctccctccatataaaagataagaggagaaaataaaatgagcattgtttttacggaagtacggatcgaagaccgtggtggcgtggagctttcctttatggagggtggttgtttggatgaacttgatatccgcgagcttttgaagcacgaccagcccttccgcgatatgtgggacgcagtaggcagcgacgcaaggatcgccgtccagcagtatcgtttccggggcggcaaacagggagaagaattgggtgacgaaaaccacttcgccctgatgcgcgcgtatgatcgcgcacactcagacgaggacggatctacttttgtcgaacgggacgatgtagactggctggatgactttgaactcaccaaagacgatcttgcagacggtaagtgacaaactcgcattgataggggagcgttttatatggaaacgagtattcttagcgcctattccaagaatgaatgccagaagtattttgactatctggagcagctgcgtcaaagcggcgaaacaaatatgtacggagccgtaccatacttgcagggagaatttccggagctgcgatattcgccggaacgggcaagaaaaattctgttggcgtggttcggcacattttgagagaaggaggcggatacaaaatgctgaagccctaccggacagttcaggatgttctttcctctccgtgggcgcaggtgcagagagtgaaacgtagtccgcaacagacagaccgcgttttgcgctcgaccaaactggaggatagcatttaccgggatctgcgcatggaggatacgggtatggacgagatcgagaacagcgcaggcgaaaagctgcgctcttttccggcgctctcgcgggatattttccagtccttttattccctgatgccccggcgcaacgcggacgatgacctctcagtagcggcgcggaagatcaacatgccgattctggagcacatcacccaaagcgaagactaccctacgctcaaggaggtgtgtgaaggacgggagcttccggcctatgaagcggcggcagagtttgctgcccagacctcgggagaactggatgacttactttcccaattgggcggaaaacccggcgctgtgcagacgctggaaaagctggagcaagcagagaaaaccgcagaggacaagctcgcggcactgctggagcagctttgtggggctccgcaggacgatccggttctgagtgccgctgtggtaaaagccgccaatgacgccgagagcaaacggcggcaggcagatgcggtcaataagctcgttgacgccggccttgcgcagaatcagacagaagccggtgcactgatcgcccgcgcggtgtctgctgccgcggaaagggcggaagaagtacagacgatcctcggcgcatggagcgacgcccccggtgatatgcggaagacagacgcaaatgcggcgcttttagagcgtgtgcgcgatagtaaaacgctgcaggacatttcccgctatctggggcgtttccgggaaatttttgcgcagggcaagcgcaatggctatgcctatggccgcggagaaaaatatgcattggagctgggaaatgatctatctcgcgcactaacctccgagcttgccatgcttgctgtgccggaaacgctgccgttgttcctgcggaagtatcagcaccggcagatcaagcaataccgtcggcgggagccggtctataagggcgcaggtgatatcatatgctgcctggatgaatccggctctactgcgggagatctggccgcgtggggaaaagctgttgccctgacgctgctggagatcgcgcagagcgaggggcggaaattcgctcttgttcatttctctggtcccggccactttcaaacggatgtatttcttcccgggcagttttctcttgaagagaagctgcgcgcggcggaaacttttcttggcggcggcacggattttcaaacgccgcttgcggaggcggaacgcctcatgcgggaggatggctttgaaaatgctgacatcgcatttattacggacggtgagtgttcgctgccagaaatctgtgtggagacactgcaaagggcgcaatcggagcttcgcttcaccgtcacagggattctgctggatgagggaaacgccggcatggatttcagcctgaaacccttttgccagaatatttaccgtaccagtgaactgaccggggatcagatggtcgaggaaattgtactggatcgcgtatgatattggttgcgcacagaaaggaaacaggctataatattatgaaatataaagatgaaggaggacggttatgcagactctttaccatggaagcagagtggttgtggaacaacccgagatccgcattcaaaaattccataaggatttttattggggcttttactgcacctcctatgaacagcaggcgctgcgctgggcaacgcgctttggaaaagctggggttgtcaatgtctattccttcgatgaccagactgagctcaacatcaagcgcttcctggaaatgagcgatgaatggttggattttattgcggcatgccggaatggagttccccatgactatgatgtggtggaaggcccgatggcggacgataccatcttcaattatgtgcagagctttttggatggtgagatctccagagctgctttctgggaattggcaaaattcaagtatcccacccatcagatcagcttccacactgcacgtgctctcgctgcactgaaatttgaaaggagctatgtcgccaatgtgcaagagaaacaatgacgcgctctttttcacctgttctctgatcgaacagcttggccgctcccttcacatgcggcgcggtaaggtggctgcggaactgggtgaggccggcattcagacgctctaccgcaatgcagacattctgcactgtgagccgatcgaaaaggtcgcggacgatgtgatcacggaattttcactgcaaggcggagactttgacaatcttgccgaggcaagatatacagtccccgatgtgtggacgatgggaaaggtctatgcaaggctcatcgaggatgtgtccgatgaggacaacatcgtagaaaccatcttgcaggtctttacctcctggatcgacgctctgctttcggactataattctgccttctattatcagccccgcgattatattgcggagtgctaccggcagaaaacggtcttggacggttgagaggaacgaaaaaggcgatggttttctatcgcaacacttatagtagaggcgggaacatcattgaagatgttcccgccttgtgcctctatttgtcatcgcctctgtacatcttccataagcgcccagccatcatcggctcaggtatttccgccgatccagcaaaagatttggtgttaaagccgacctgatttgacgaaaaaaagccgggctgttttgtcggatagccggagtgttttggctgcatggccgagttgttttgtcattttatcggctgtttgatgtggcaagccacatttcgtcatttataaaggaacaaaacattagatttttcgtctattatcgtgtaagatataatagaacttgtgtctataacgaaaaacgaggtggtgtagtatatgaaagcacagtccaaaacgataggaatggctattggcgttgttttaataattgctatatttactggggtggtgttgagcagccggggtcaagctatttcaagtgaaatttcgggaaattcggagggaggtgccgcattgtctctcgcaaacacggaggatacagaaattataataaatgaactcacctcggaaattcccgaaacaggcttctttgctttgggccccgacaactaccatgaatacacaaaagaagagctttttgattactatgggattgaatttgatatttcaagtgttttccccgacatgattgaggagaacaccgggtcttatggcatcttcaagttcagcgatggaagcgatatgcaggggcataatttcatatgggccaaccctatcggtaatgagaaagtaagtatagaaataatcaaagacggagcaccaaagtcggacaatacccaagtaactaacgatagtgcgccattggcctctacaatttcgggagaaaatgtaaatatattccgctttgacagtgacgagcaaagtggatattatgctgagttcgtccacaaaagtctcgggtttacagtctatgggtacaacttcgataaagatgattttgtcaggattctatcctacttaatttcttgttaatgtgttgcaaactttgcggaatttgtgataaaattgaagaaaaaagaaatgcacagttcttagcttatcgggaactgtgcatttttgtaaataaatacttttaattagccgattacggcgtccagccgttcgccggcacggggatcgccgctgaccatccgcgccatttccaagtcgaagctctcaaacggcgcaagctccagcagaaaacggcgcaccagcaggtcaaagcgccggtagatggcggtttcaaagtagagaaacacctcccggaacacccgcgccaccaactccggcgtccacggcttgcccggagacatacaccgggcggtgatggctacgcccagcggatagcccacggattctttcaaaattccgtcgatctcactggctgccgcctccacgccgtaaagccggagcagccgccgcacatcgtccgcatcaaagagcaggtcgtcggcctccagcaccgtcatcaggcccgtgtattggaaggccatgagactccccggcggcgcgccgcgggagagcaggacgaagcggcgctcggggcaggcacggatcagttcgcacagggcattccagtcctgctcctcctgcatatcctgcaaatcgtccagcagtaagatttgccagtcagcctccgcagagggcagcttggagccggcactgtccgccggcaggcgcaatacctcccggctggacagtagcgcctccgccaccgccgtttttccaaagccgcagggtgcgctgaaaaagagcacgcgaccctgccgcagaaaacggtcaaactgcttctcaacggacggttttacgataatgttgtcctgcaagcgtgtccctcccttgcaccagagtggaattgtcccgtaggggaaccctacgggacaagggggcacgcccccttgtcaatacctctttcgacacgatttataatcattcaaatttattatactacccctgacggaaatgtaaatcgttccaaagtatgagaccggtgattttggttgcgggacagtctatccgggggccttttcagtgggcacattcagccattttgttttcagagtttcgggatgaatcagcatgaccggtctgcccagtgcaagcgcataggacacagccttatcctcggcgctcccatccgcaaggtcgggatcatagacagccaacaccacggctgcctgcttgatgatccgctgataggccaaaagctgggcgtcaggctgctcatggaagtcgatgcagtccagttccgtgcatcccgcgagcatattgaagtaccgctcccggagctgcggcgtccatttggtagactgctcctcatggggtatgacgcagaccagccgaagggatttatccttctcccgcagaatattgatgatctctgcagcgtacagccccacgccggggtcgcaggccacctgaaactccgcgacaccgcgctggcgcagttccatgatccgctgcgccatctccagcttcatgcggcggcagccgtcgtcctcctcgtcaaagccccacggaaaccgcaggggatgctgaccgatcaccgcacagcgaacattctttttcatcgttccaccttctcttattgtagtctatcggcttacaatcagtattctaacagccgctatttttcgcgtcaacgagaatgtaagctataagcatacaaaataaatgctgatagcacacaatcggaggcgaaaccatggataagaagttgctcggaaagcgaatcaatacggcacgcaaggaacggggctggacgagtgagcgtctgtccgaggcgtgcaatatcaacgcgacctatcttcggcaaattgaatcgggaacgaaggttcccagtctgcaagtgttcgttttgctgtgcgaagcgctcagggtatctccgacctatcttttggcggaggtcttacccagcatggaattttcggatatggatttacttttggagctgtggcagacagccacacccaagcaaatcgccatgatgtcctccatgatccgcagcgccttagaagcatcgaaagattaacaggaatgcgtctcgcaggaggcgcattttttctcgccgttgattgctattgtcgaattaaatactacgataataactattaaaatgcaacgatttttcacagtataatatacgaaaaatcgttggcggtgagaaaatgacagatattcttggaattatcaaaacgcagcgcgaagcgcggggctggtctgagtatcagcttgctgagcgttccggcttgccgcaatccacgatttcttcatggtataagaaagacatgacaccgtcatttgcatcgttggagaagatatgcgacgcctttggcatcacactttcgcaattctttgcagacggagaagaaagcgttgtcctgacaccttcgcagcgtaaaatgttggataaatggaactgcctcacagaagcacagcacaactcgctactgatcctcatggattccatgtaaaactacttctatagcgacagccgggagcttccggctgccgctgtttcttttgagtaaaaaaaggaaagcgcgtccacccgcgcaaacgcacaggcagacgcgccttatcgcagtacaaaaagcccctgcgccatctattcaaaaaaagagggcgcaggggcttactgtatgctatgctgttttatcgtatggcgtctttgagggccttgccgggcttgaaaaccggcaccttgcaggcagggtaggtcatgggctcgccggtacggggattgcggccaacacgggcgggacgctctttggcctcgaagctgccaaaacccaccagctgtaccttatctccgcccttcatggcagtttccaccgtgccagtgaaagcggcaagggccacttcgcagtccttcttcgtcaggccgctggcttccaccatggcggcgatcagttcagttttgttcatggaaatcgctctccttctcatttgtagtatgaccgcattataacggagggagtcggaaactgtcaactgtggcctgcttcggcgtagtattgcggtcgtccgatagaggtaaagccccccagcctggtcacgaccacattgttatagccgctggcgcagtgaatgattagcaattctccgtttgcgttcctgccgccaacgatgcccacatgggaattatccgggtatacccgtctatcgccatcttccgcagatacgcgccataccgccgtgtggggagctgcgccatcttttcatctatgagccgtttttcctcctccgtcacatagaacttcatctgaatatttcgctttcggttcgccatgggcagcctccgtttctcataagggtctgggacgtctcgcctgccggctcggtcggcgcttcaaagcgcttcacgctttgaggtctccaccggagacccgcgccccagcaagcaattttgactgttcgggcaggggacctgaacagcgcaaaatccgcaagcgggtactcgcttgctgtgcttgctgactacttcgtaccccgtattttcccctctacccatactacaatccgaacagggcgttttggccagattttcggaaaattgttttgcaggacgaaaaaagaacggtctgcattgcaaaccgttcataaaaaagcagcgcacaagttacttgttcctgttgcgtttggttctgcgatatgctatactaatggtgtttacaccacgtcggaaaggaagtgatcctcatagccatcacaagcgcaagtttgcctacgaagaagcggattctgaccgtttgcgtgaagctgtttttggaaaagggctacaagcagaccacgctggcggaaatcaacgaaaaggccggtgtgtctttcagccagttccagaacatttttcgcgccaaggacggcgtattgacggagctggtggagttcatgtttgaaaaccagttcgctatggcgcgaagcgcggcgggtgcgaagctgccgccgatctatgtctacgcggtcgaaacggcaatccagatgacgctgacggagctgaacgaaaacctgcgggagatctacattgaagcctacacgcagaaggaagcgtctgaatttatcttccgggaaacggcgaaggagctgtatcagatcttcggtccgtatcagccggagctgaccgtccgcgatttttatgacatggagatcggctcagccagcatcatgcgcggctacatggcccacccctgcgacgaggagctgacgctggaaaagaagctgcggctgtttctcaccatgagtctgcgggcgtacaacgtcccgaaggaggaaacggaacaggcgatccggttcgtggaagggctggatatccgcacgatctccgaacaggtgatgcaggcgctgttccgtgcgctggcgatgcgctttgagttttcccttgcggggatcacgctgccagcacaaaaatagaagccaatatgtattgcaagggagtactcccttgcatcgggatatatcccgatgcaatcccctcttgctccaaaacgcgcttcccacgggggacgggacggcgcgagaagaaagcgaggaatgaccatgaaaaaacgactgctcagcatcctgctcatgtgctgtatggtgctgacactgctgccaacaacggcttttgcggaggaaagcacggaaaccccgcccgtgtgcagctgtgaaacagcctgcacggcggaaagcaggaacgcagagtgccccgtctgcggcgcagagggtgcttcggcggagaattgcgcaaaatacatcaagcccgcagacgatgcggcagtgcagccggagggggaagtgtccgacccccagccgaagacagccttgacggcgttaattggcggaagcgagacggtaacagaagtcagcaccgcggatgagctgactgcggctattgctgattctaatgtcatcaccgtcaagctgacaggggacattagcatcagcaactccctgaccgtcaaccgcatcgtgacgctggacctgaacggtcatgtgctcaaatatgagagcgcaaacaaaggcagcgtgattgtggtcgagggcagcggcaatctgacgctgactgacagcaacaccaccgcagtacacaagttcacgcccgacaccaacggcctgtgggtgctggacgaggcaagcggcacagagaccgtcaccggcggcgtcatcaccggcggcacgggttatccgtttccgctcagcatcacagtaaattgtggcggcggtgtgtatatcgcacccggcgggcagttgaccatgatcggcggcaatattatcggctgctccgcagagctcggcggcggtgtatgtatttatccgaggcaaaacggcgaacagattcagttctctatgtccggcggcagcatcgccggatgcgtcgcctccaatagcggcggcggtgtttatgcttccggcaagttccaaatgtcaggtccggcggtcattcgcagctgcaccgtcgaaagcacggaccaactcattcaaggcggaggcgtatatgtcgacggtagctttgaaatgtctggtgaggcaaaaatcgaaggctgtcaggcaatctccacatctgcctacggcggaggcgtatttgtcaacagcagccgtagctttgtaatgtctgagaatgcaaaaatcgaaaactgtcaggcaatctccaaatcttccgactcttccaagggcgggggcgtttttctcgcaaacaatacggagttcaccctgtcgggcagcgccgtgattcaaaattgcacggcaaaaaattctgccacccccggcaaagcctatggcggcggcgtgagcgccgcttgtgtgagggagatcaccttggaggacaacgcgagcattgccggctgtattgcgacaaacggaagcggactatacatcaccggctctcagctacctggctatgggaaacttttcgccaacggcggctcggttgacggcgacgtcgtgctgggagacacaacagacacaacagtcggtcccggtaccattacaggcactggcaagacggagttcaacggcaaggtgaccgttacccccggcagcaccatcggaagcggcacattcaacggcgaggtcatcaacaacggaaccatcaccggcggcacattcaacggcacggtaaacaacaacggtaccatcaacgacggcacattcaacggcgaggtgaccaacaacggtaccatcaacgacggcacatttaatacccctataaccggcagcggcacggagagcgacccctatcagatcagcactgccgcccagttaaagcggtttcgggatattgtcaacggtacgggcggccagacacagaacgctggtgcccacgccaagctgatgaacgacatcgtcctcaacgacggtacgtttgacgagaacggaacctatacccccggtgccagcggtaaggccgcggaaaaatggacgcccatcgcgtattccggacttttcaacgaacacacaaccctgtattacaccggtacctttgacggacagggccataccatcaagggattgtatgtgtctataaacaacgcaacgtctatcggcgacgcagtctgtctgggcttgttcagcaccgcgaaaaaagcggtgatccggaatgtaacagtcaccggatatgtgttcggtttcgccggaaatctgggcggcattgtaggctacctctctgacgggactatcgaaaactgcgccaattactgcacagtaaagagcacattagctgacacagaaggtccctcttacgttggcggaatcgccggcgctatggataaaggttccgtgatccgcgactgctacaataccggaacaattacggtagtcgagtaccgtgaatggaatatgacaggcggtgttgtgggatatagcgatgacagcgcagtctccaactgctataatgccggtaaggtggcaggcagttggaattacaatggcgagatcgcgggggggtccaacgcgggcgacgagaacgggaacccttccaccgtgagcaactgctactatctggatggtacgggatggaacgcggtgggcaatggaaaaggctccatcacaaatacagagtccaagaccgccgcgcagtttgccaatagtacggtgctggcgctgctcaaggctggcgcacgcaccggaactgacccttgggcagacgaatgcaagtatctggatacggcgggcaagaccctgccggtgttcaatggacagggcgacgcccatgaccaccagagcaacgactggaaatccaacgaaacggaacactggcaggtctgcacctgcggcgcggtgtttaataaggcggaacactccggcggcaaagcgacctgcaaggcaaaggccaagtgtgccgattgtggtgcggaatacggcgataccaatcccaatcatcatggcgacaagctgaaacatgtggtggccaaggacgctaccaccagtgaagaaggcaacattgaatactggtactgcgaagcctgtgaaaaatacttctccgatgcagatgccaaaaatgagatcactcaagcccaaacggtgattcccaagcggcattcttccggcggcggctccggtggctcgtccagttatcctatcaccgtccccggcaagaccgagaatggcaccgtgaccgtcagcccgcgttccgcggaaaagggcgatactgtgaccatcacggtgaaacccgacagcggttatcagttggatgacctcgccgtgaccgacaaaaacggtaaggaactgaagctgactgataagggcaacggcaaatataccttcactatgccgtccggcaaggccaagatcaacgccacttttaccaaagaagctgagccaagcccgttcagcgatgtgtccaccagcgcctattactacgaggccgtgaaatgggcgcaggaaaagggcatcaccggcggcatcggcaatggcctgtttggaccgaatcggccctgcacccgtgcgcagatcgtgaccttcctgtggcgagctgccggttctcccgcccccaagagcatgagcagcttcacggatgttcccgctgacgccttctatgccaaggctgttgcatgggctgtcgaaaacggcattaccagcggcacaggcgagggcaagttcagccccaacgctatctgcacccgtgcgcagagcgtgaccttcctctatcgtacctccggcagccccgcagtcagcggcagcgccgagttcagcgatgtttccaccacggccttctatgcagacgcagtggcatgggcagcgaagaagggcatcaccaccggcatcggcggcggactgtttggctccgacaacgactgcactcgcagtcagatcgtgaccttcctctggcgctgcaagaagtgaccggctgacatacggctaaacatcaaagccgctgacatgaccccataagcggacatcggacagcgcagcggacgggcagctcgccccgaagctgcgctgttatcttttcgctacaagaaacaaatcaatgacattttgagctgcgccgctatcccagtgcggcaaggagacagcattatgaaaagaatcacaagaatcattcgtccgatcatctgcatggccgtccttctctttgccatgaccacggcagtcatgggctgctatcagaaagagacggagcctatcgacatttccggcagaacgccttccggcacatctgcgcctcagccatcagcgactcccgcgggcgaagttatcccctcggtggacaggcaggcagagttggcggaagccagagcgaagaatcccgacaccgtggcatggctgtatatccccggcgcggaggtggacgatcccgtgatgcaggcggaggacaacggctacagaccataaggcggatcccgttcaggtcgtcaaggcgctggtggagtctgccgactttacgaacacggaatggaacgaagctgcaatcaaggctattctgagcaaaggggcttggtgaaaatatactatccagagcgttctctttactatggaaaaactccaactatacagtctttccccgtaatgctacaatgaagctgtatttcagggcgaagtaagttagggcggagtaagttaggaaagaaagagtggaaaggaggtagtatgccctttgcacagctcatggcggttttaccgcttagagatgtggcatgctccttgcgagtaccgtcgaacccaaacgacttgaaatgtaataaggacgagaacgaaaccgtaattgctcataggagtgattgcggtctttttttgtccccaaatcgaaaggagtaatttactatgagtgaacccagcaacggcgcgtggccctttcaggagatcccagaagaagagggattggacatcagcgcgatttttggaaacagcagcgctgtgccgcagggagacccgtttgcgcctccggcggcagcacagagcgttccgtcgtctccgacacccgtggcgcaggaaatcacaccggcagttgctgcaacattgcagccgacaaccgcacccatcgttaatacgcctgccaaggcgccagccgaagctcctgcggagaatcccattgccgcggcctttgagcagaaaacagcggagaataccaaaaagggcctgttggaaaagcctccggtattttaccacaagggcgtgaaagaggagattgacgatccttccatgacctttgaggaactgcgtatccgcaagtccgatgattttaccgatctggaggaaggcaaaagggtatcctggagcgtggaatactgcggcatccgcaaggaggtcaaagaccccaaggggaccacgatcatttccatgaaggagatgatcgaacgctctcgcgaatttctcgacgccctcaagaaaacgaaggacaaagatccttgctgctatgtaaagcccaaggtggaaatgaaaaccaagggaaatgccgcttataaggggaaattcggcaccttggaagaggctcgcaactcggataaggttatctgcctgatcccctccaacgacggcaggatctatgagcttcgcaagatggagcagggcgagtttatcgcccccaaaaagaatgtggtggatttctctgaggtcagagccgggttttccccggctctgccgaagatccccgccgagctgatgggacagatcatcgcctttttccgtgcctttatgacggatcatggggagaatgaagcatttgcccagatttactgggacaaggcggaaaaacgcttttttgcctacgtccccaagcagagcgtgtgcaaggaggaagtagaggccgatctccatgactgcccctatgacgatgaagagcggtatctctgctacgcggatatccactctcataacagcatggatgcctttttctccggcaaagatgatcaggatgagcgctccacaggactctacctcgttttgggaaaacttgataaattctatccggacgtcaaggcgcgtattttctgcggcgactcctttgtatccatcgatccaaatattgtgatggaaggattggagcagccgtttcccaaggaatggctggcgcaggtaagcatccgcagcagaaagcccgaacgattcaaaaagccggataagcgcagcttccgggaccttctggaggaggcgttcctatgaagtttccaacggatcgcccggtcaaggtggtcatgctgggggccggcggcacaggaggctatgttgccccgtatgtgtttcgcctgcttcatatgctggatcgtcctgcccgctttgttgtctgcgatggggatattgtcgagccaaagaacctggaccggcagaactttgtccccgcagacttgggtgaaaataaagcccgcgtgctggcagagcggtattccactgtgcttggaatggagacagagtatgttccaaacttcattgaaaagctgccggatctgatggaactgatcgagccgaaggaatgggagctgaatccctattctaccaagcggacgaaggaaatggtactgctgctgggctgcgtggataacaataagacgcggcagctctgccatcaggcttttcatcagagcgaggaactcatctacatcgacagcggcaacggaaagtacaccgggcaggtcgtgtgcggcgtgcgaaggaacggaagaacgatccgcaaatccattggcggcgttcatcccgaaatgctgaaggacaccgacctgttcccttcggagatcagctgcgcggaagccgcacaggaagatccgcagagtattgtggccaatgtgactgcggcgaccgctgtgctcatcatggtctataacattctgacacatggagaaaacaatgccatgcagacggatttttccacccgaacgatccggatgcagacagtgctggaaaagaagacaaggaggcgtgcggcatgagtcgtgcagtagttgacgcaaaagagttttcccatgcaatgagcaaaatcagtaaaatcctcaaaaagtgcgcaatacccattctggaggaggtctgtctccggattcagaatgggcgctgcacattgacggcaacagatctcgaaacatggcttacagcagagctcccggcttcgggcgatgatatgttctttgttttccgaaaaaccaaagacatcctgcgcgcctgttcccactttgccggtgagctgacgatggaattttccgaaacgcggagcggcagcaaaaaagccggaaaggttctgctccgctgtgaacgccgcggtgcggaatttgaggtctacgacggagcggattatccgaatacgccgcaggcttcggagggcgatgcattttcagtaagcagcgcgaggctttccgcctgtgtggagcgtgtgcgctatgctgcggaaaagccaagcgtgagtgcaagacccgctgcgatctgcgtgcagttttgcgggaatcgtatctatgcactggatggaacccgccttgcctgcgatacgctggaaggtgtttctttcccaaagccttttttggtgcgcgccgatgtgcttgcgcacctgagcgctttcggcaaggaagatatgaccgtgcggatcggaagcagccatgtgctgtttgcaagcggcaatttgcgtatgcttgcccgcttacagggcgtggatacctataacgtggatgcagtgatccctaaagggtatcgggagagcgtgacagtcaaaacggctgattttgtgcgggaactgaattacctgaaggaatgctctgcgctcacggcaaagccctatgtgcgctttgcgggcgaacagctttccattgcggcgcccggcggagcatttgaaaccggcattgaggtgaggggccgcggagacatggttctcggctttgatctctaccatatgctggatgccctgaagcagtttaagggagaagcggaggtttgcatccatctcagcagtcctcatgctcccatcgtgatcgatgctgcggggcgcagtgattttgccctggtggtgccggtccggctgaaagaggaaatggcagcttgaaaagaaaaaaagatggcatagccatctaaaaaagaaaaaggagaatacaagatgaaaaccgtttacattcccaagggagaaactgtccattatgagtctctggcaacggagcatctggtggtgcatggccgccttcatgtgacctatggcgtcaaggcgcagagcatcaccggaagcggcgtgatcgacgccggcagcatcaacgcggatactgtctgcatcgacgatgtagaaagcggcaccgtgatctgcaagcgcctgatcgccaagcgtgtgcaggcaccggaggtgtttgcctccgagagtgccgccgtatcctgcttcctttccgcagcctatgtggaaacgggaaagctgacgacagcgatcagtgaggtggatgaggtcgtggcgcaggaggtcgtgaatctcacgccgaaaaagcgcaccctcttcggtacactctttgcctccatgctgcgctcgttctggacggcgctgacggtacccgggcagaaagccgaagttctggacgctgaatttgtacctgcgcaggaagaccacacggaaactgtgcagaatgaagggagcgcggagttctctgcatctgatcagagtgtgccggaagtcgaagaaaagcaggaagatgtagtggatgaggaactcaaccgtatcgttgggctctttaagctctcacgcgagcagggttataccctcaagctgattcccgggacaccggaggaaaacgcgcctgttttcgatttcgaaaacgagcgcatccttcgccccgcagcttaactgcctatgtgtgaagtgaaagtggaaagcagaacccgcgtagaggaacacggtcgcactgtgctctatgaaaagatctatcgcggtgttccgacgcaaggcggcggactgcgcctgctggcatattatgagcggcggattccccttgcccgtatgcagatggaactgcgggcggcgagacacgaaaaagaatggaagggagcggcgtgagccgcccgaacggaaggcaaggaacagatcgtgttccttgccctcttttatccggaaataaaggaggatacaacatgtctatcaaatcgcaggaaggtcacatgcggcagcttgcgctgctgctgaccactgatttaggttgcatctttgacgagagggaaagcggacccaatggaagtaagaaagcttttttgaatgtgggaaaggtattcctccgcgcccttgccaaggatcttggactgcacgaggttacagtcagtgcaaacagcggcggcatcgcggtgtcgggaacatgctccctttatggaatgtgggaggacagaggcattgcggtgtggatcgagcagcgcttatgcgcggatgggaaggtgctttgctatcggacgatccgaagcagcagggacttcaaaggcggatacaatcattttctcaccagcagcgacctgaaaacctggtcatatccgcagcttttggagacgctgagtgccttgcggaaggatgggtgccgttatgagcgagctgcctgacctttccacgcaaaagccgtatgctctggatcagcttgcgcagcttcaaggcaagatcatccagctctccaaaagcatggttttgcagcgggcgaggattgagcgctgccgccaaagcgaccttgctgcggcacgggatatttacgcggaactgagtagaacgcgggaaaccttggtggaaacactcgcacaggtgcagcttttcctcatggaaatggaggaatacgcacttgcgaaagtatccggacagcttcggcagggccttgcaggatttgcattgatgagcaccggctataagagcgtctacgaggcgctgagccgcttcgcgtcatcccttcctgtgggacaaaagaccaatgctgcggtggtaggtcggctgatgaacaacattaagctgggctattacccaacagacccggataatatcgctcttcttttgcgggggatccgatttccggaaggcgtgaccacgaacttgttggatccctgctgcggctgcggcaaggcgcttcgacaactggcgcagggcaataactgctatgcctatggcgtggagctggacgagagccgcgcggaggaagcacagacaaggcttcaccgcgtgggcttcggcagcttctttcatagcagcatcagccgggaagccttccatctgctgtttcttaacccgccgtatctctcggtcatcaatgagagcggcggacgctcccggcatgaaaagcgatttctgattgaaagcctgcctgcgttggcatacggcggcctactgatctatgtgattccctattaccgtttgacaccggatatctgccgcatccttgtggacaattttgatgatcttaccgtctggcgctttaccgagagtgaatttcggaaattcaagcaggtagcggtgctgggtgtccgaaagccccggggggcagaactgcaggataccctctggctggaggagcttgcgtctgcgcccgatgccatccgctctcttgcagagatgccggaagaacgctacgctctgccggatcacacgatagaggtcaacacctttaagggtgagcggttcaaccagaaggaattggagcagcagcttcggcgctgcaacagctttgcgcagatgatggcgcgcagcgaactggacagcggcgtaaagcggccgctgctcccgctctccatcagtcagatcggactgatcggcggctccggtatgatcaacggcctcatagcgtgcgatacgccgcacatcatcaaaggccgcatcgtcaaggtcatccgcacagagagcgaggaaaagttcagcgcgcagggcaatcacattggcagcgaagtgaaagaaaccattacaaacaaaatgattttcaatgtcctgacgccaaacggctttaaggcattgacatgaaaagaggcggaatttatgcaagacaaaaaagcgcgttttcgctgcggtcagctctgtgcgacgcctgcggcattggataaggtcggaagagcagggcttacccagcttttggaacgccatctgagcggcgattggggtgatacctgtgagagcgacgcaagagccaatgaggaggcgcttcgcagcgggaaccggattatttcatggtatcaggtatccaaagagcttcgcattatgatcatcacggaagcggatcgctctgcaacgacgatcctgctgccggaagaatattgaggtgaatgagaatgaagttttgcaacatggcagttgttgtcccggtagatcagttcaccggcagcaaggccgcgctcagcgcgcaggtttggggacaggtatccaatctgctgatgcctgccctgggaaagctgtatcgtcagttctatcccgcaaatgacgcatggggccatgaactcaccagtcctttcagtgtggtgctgggctgtcaggagccggagctgttcttaacgctcttcctggccgggcagcagacacagcaggaggccgctgcatttcatgcagccgccatgatcaaaaaggtggatatggacaaggcgcagaaagcgggcgattcgcttatctgccccgtagtggtcgatggcagcgatccggagctgatgattcacgcgctgtggcacatttcgctgcaaaaaggcgcaccgctcccagactgcgggatctactatgccgccctcgggcgtgcagtcgcatctcaagaggaacagcgggcgattctggcaaaccccgccggatatgccctttgcgtcgtgcggctcagcccggaggtggaaaaaagatgactgcatttgatcggaatgttttcgtaaaaatgctgctttctgtcccgcaaaaagacgacgcggcgtttttccccaaatcagagcgcagcccatatatccaaaagctgctggaagcctttgataaagaagaaaccattgacctttctatcattgattgggatgcgttccaaatagagaatgtaacgcccgaaaattatgagtgggtctatcatcgggtcttcgatggttggatacagggctttatccactactgtcggaaagctcctgttttccagcggcaagagcgttctttcttttgaggtgccggttatgtatggaattgagtatgaagacgatatcctgctgcttctgcgtatgattaaattcctgcatatgcagtctccggatgccgcacacatcttttgccaaagccaccctgtcgttgatatggaggagcttctcatggtgatcgatgaagttatgtgggatatttttgacgatgtgaactttttctttgatgaagagtatgaagcgaccgtcgtgcaatgctcccatccaatcatcgaccggctgtatgagcaggggcgcgcttctgatccgaagcacggaagcaggcaaagcgtatggagtaaaaagctgcatgatattactgagtatttcgtgctgggggcaacaaactccgtttacaaattctcacagcatatcgccggagatcatgtcattctggaattttgcctgtcgccggattactacgagccgctctattttgcaaattcgctggtggatctgcttcgttactgccaatgcagcatccggcgaatagaggcaaaacttgctgagagagaaacggaaaacataagaaaggaggctgcctgatgcagccggctgaaaacaaggattattcgagagatgtcattctgcggttatctcctaccagaaatacgatcattgtagaggagcaaaaaccgggcggcattgccgcctacagggaaattgatcctctggagctgtactatgttatcaaccagagctatgccagcaatgattatctggacagcggctttcttccggaacactgccttcacctatccatgtccgccacggagaagtatttcgtactttggaatccggaactgcgggcagatgtgatctatggggacagggaatacccaaattttccgattccccgcatggtgtttggcgtgcgggttctggaaaacggcaaagtcgcggagtgttccatgggcgtcgttgcggatgaagcgccaactatggatacgccgatgttcttttaccccttttccaatgtccattcggatgatcgggtctgcacgggcaacaatgtgctgcctcggtatcgaaagatttccgcgctgaagaactttccacggtatctgctgggtctacctgacaacgacgatatgtatgacagggagcataacagattaaagctttcgcacggagagcttctggagcatctcaaggacaaaaatcctacatattactacacggacatcctggtatccaacggaaaaacactgggagattttatcagcaggaggtagcatcatggcacagcttaacccaaaagaaatgcagcaggctctcgcaaagcccttcgccccggaggatctggaatggcggctgcagaacacgacggaagagaagatgcgcggcctagccgttccctatgtgacaaaccgcgccatccagaaccgcttggatgaggtctgcgggccggagaactggtataacgacttcaagccctggcacagcaacgggaaaaaggaggcgcagctttgcggcatcgccatctactttgaaggccgcggcttcattaccaagtgggacggcgccgaagattcggatatcgagtctgtcaagggcggtctatccgacagtatgaagcgcgctgccgtccaatgggggatcggccgcgtgctgtacgaccttaataccgtctgggtcgagattgagaagcgcgggcgcagctttgtgatcaaggacagcgaacgcgccaagctggatcacgcttatctgagcgcactgaagcgcctggggctgacaccggccgcggcctgcggcattcaatcgctgctgacgccgaaaaccctaccggggcagacagcaccggaggaaaacgcgcctgcagcaagtccgcagccaaagcagggaaattcccagcccgcgcctgcatcggctctgcaaagagcagaccagcctgcgacacggagcgattcacagcagactccgtccgcaccgcaaagcagagcggcggtttcccgcacagtctcctttaccccgccgcagagcgcagcgcggcagagaacagactgctatgtggttctaaacaccaaggtacagggcggtatgagcggcagcagcacgcttgttacgctccgagcgccggacggcaagcagatcccggccttcgcccgcggcgcacggcccgaactgagcacaggcaccgttctgagcaatgtaaagctcaccatgcgtcagcaggataccgtggcattttacgtgctggaatcctacgagatcgtcccgcaagaggacagggcggcgtaaacagcgattcagcgaaaaatggaaaggagcaattctttgaaaaagatcaagcagtttcaaattaccagcctgatgctttcgggcttcaagtcctatgaggagccgacagagctggtgttcggcaaccccacggtcatcacaggcggaaacgggcgagggaaaagcagcattgcagacgccatcgcctttgccgttaccggctgtcccttctttggagagcgtggaattgaccgcctgcacaatgagaataaccccgatgtcgccattcggatgtgctttgtggacgaaacaggcacgctccatgagctcaatcgcacccgcaggaaaaaccgcatgaccatcacctatgatggctatgagatccggcagttggatctggcagatctctttggagagcgggatgtgttcttatccatcttcaatcccttgtactttatcgaggagttgggagaggatgggaaaaagcttttagagcggtatcttcccacgatccctcatgaaacggtactctctcagttatctgagcccgtgcgggaacatctcaaaaacgagacgattctctcgccggagggcagtctcaagcgctgccgggaggagatccggggtctggaggaacgcattacctatctgagaggccagaaggacttggcggcgtcgcagggggaatcccatgagcaggccgagcaggagctgaccttgcaggtggacacccttcgcgaggaaatcgcggaactggagcaaaggcagttttccggcatggatgtaagtgacatgcaggagcggcttgtagaactgagcggacgatatgaggaagctgccagggatgaacgcaccgatacttccaaattgcgggaacagcttcagaccttgcgggaaaagatcgcccgcagagaagtggagaagtaccagtccaaattcacggaagcgttggcggaagcgtctgccagagtcaaagacctgggtgtgcggtatcagcgggaaaacgctgcatataaggcgtttcacgccggtatggagtgtcctgcctgtcaccggagcgtgacagagcagagcttgtccgaagtgcaggcggcgctgaaaaaagtgctctccgagctttatgctgccggcagcgaacagcgcgctcagctaatagagcttcaggagatggacaaaaaggctgcggataccttcgcacggttcaaagaagatgaccttggcaaatgggccgcggaagctgcggaaatggagcagcgctgtgcctcgcttgcggagcaggcttccgcagaaacggagcgcctgcgcgcagagatccagacgctgactgctgatctggagtacggcaatctttcacaggcggaatacgaccgcctcggtacatgccgggaggaactgcggcaaagcgaagcgaaaatagcggcgcttcagactatgacggcggcgcagcttcctgattttgaccgcgagatcgcgcaggccaatgccaacattgcggagatcaagcgcaaaatggccgatgtgatcgcgtacatcagcaagcgggcagagctgaccttctcgcagcttaaaatgaatcgcgtggagatctcgctctacgatgtggtgaaatccaccggggaagtcaaagacaccttcaaattccagtatggcggccgccgttacgaccgactctctctttcggagaagatccgggccggcatggaggtctctgagctgatgaagcggttgaccgggcggaattaccccgtgtttgtcgataacatggagtcggtagatgaccttgccaatgtaaggcccaccggacagattattatggcaaaatgtgtcagcggcgcggcgctgcaggtaaaacccgtaagacccattgcctttgcggagcagagagctgcatgacggaggtgaaaccgtttggccgcaaaaatttacgataagatccccattgtggacacggccagacggtgtgggcttgttctcgactcccggacgctgcggcgaaaggaagtcgaggcaagctgccccttctgcggtgaccacgggccggggaaatatcatttaagccttaatacggataccgaccaataccgctgcaatctctgcggcgcacacggaaacagcgtgagcctgtatgcacggatcaaagggatctgtaacaaagaggcttatctggagctggcgcatgagagcaaggtctaccccttgcctcaatcaccatctccccaaacacaggaacggcagccctgctcattggagcagcgccatgccgtgtattcggatatgctggcgcatctgacgcttctcccaaaacacggcgagaatctcttagaacggggcttgagcgaagagcgcatccgaagaaacgagtaccgcagtatgccggaaacagagcgcgggcgtcggcttttggccgacctcctgcgcagtcacggccatgacctgcacggtattccgggctttcgcacctattatggcgactggacactctccggccccaacggtttcctgattccggttcggaacaaggatgggctgattcaagggctgaagatccgtctggacgatgcgcagcaggccaatcgcaaataccgctggctttccagccgaaatctgccatccggcacccgcagctattcgtgggtgcatgtgacagggaacacccaaagcaagcgtgcgtttctgacggaaggtccgctgaagggcgatgtagccagtttccttgcgcaagatgcgctctttatctgcatcggcggcgtcaacgcgctgaatggcttgaatgataccatccgagatcttggcgtccgcgaagtcatagaggcgatggacatggatcagatgaccaatccaaatgtgcgcagcgccattctcaccatgcggaaggaagtgcgaaagatcccaggtattcgctattcaaaatacacatggaatcccgcctataagggagtggacgactaccttctcagtcaggcggcaaccatgtaacaaaggaaggacaacaatatggaagaaaagatcatcaacatgaatcagtttctcggtgcggcgcagggcgatcaggagcatatgcttggaaagttcttatacttttctcttgcaaatctgctggtggataaggatgaactgtcctcgctgtgcgagagcatgggcattccctacaccggcagcacccggctttctctcggcgatgcgttccgctccgccacaggcgatatccgggagcgtgttccggtcacggtagacggcgagacgaatatctatcttgcctactgccgtgataataagcgcactgccggcattttttcacgggaactggtcaaagaaaccctgaaccgcgaaaccaaccggtatgaaaagctggcgaatatcagctgcggtaagaacgacgggatgttccgctgtgataatctcgtgctggacgatgcggtggatgtgcagggctgctgccgaaaagcggaggagctttttgagctctaccagcgatgcgcaaaccgcaagcagatcgagaccatctgcgtcaatttcctgcggggaatggaggcaaccaaactgagtgtcaccggccatatgtactttgtcccccgcacttttatggagcgcgtggatattttcgaggacttcatcaccctgctcagcggactgaataaaaagcagacgccgctggtggtcaacagcttctacatcattgacgatgccaagcagcgggataagatgacggaggaattctatctggcagtgaaaaaggagatcgcggcctatcaggaaaagtgcgactacctcattaagagcagcagccagagtcccgcagttatggaacgttgggtactcaaggtgcaggcgctggaggaaaagaagcgccactatgagggcgtgctgcagcgcgaactggacgggctggacgatgagttttccgtcttgaagctcctttcgcaggagcttcaggtacgggccaacagtattcgcagccagcggtttcagcaaaaggctgcgtaaataaaaaacaaggggacattggcagttgagccaatgtcccctttcgatttcgatgatgagtgcatcaaatgtagcaagaaatattacgatggtaaatcgcactatcattttttagcatatattgtgacaggccctttttgctttgggcagcttctttaatttttattataacatattgggatccgagttacaagatggagacatttgggacttagcagacactaaaaaggacatctattccctctgggatagatgccctttttactatgcgtatctgctgattctggatgggtggaactgatctgtcaattctgtcggatcagatagaccagttctggctgtcggtctgcagatccaccatgtgggtgtactggccgttccgggcataaagtgcatcgggcgcgccctgttcggccaccacgccgtcggacagcaccacgattttgtccgccccagctacggtgcgcatccgatgggcgatgatgaggacagttttgtgttttatgagccgggaaagtgcctcctgaatggcagtttcgttctccacgtccagactggcggtagcctcgtccagcagaatgatgggcgcatccttcaggaatgcgcgggcaatggaaatgcgctgacgctcgccgccggaaagggcgcagccattctcgccgatgttcgtgttccacatgtccggcagcttttcggcaaattcctcgcagtttgccagctttgccgccgcaagaacctcctcgtcggtggcacctttgcgccccagacggatattttccagtatcgtattgtcaaaaagagtcacatcctgaaacacgatggaatacaggctcatgagcttttccgggtcgattcgggaaacctccatgccgcccacggtaatgctgcccttctggtagtcccagaaccgtgccgccagccgggaaacggtagtcttgccgccgccggagggacccaccagtgccgtgacctcgccctgctttgcggtaaaggagacatcccgcagcaccgtttcgccggagttgtaggcaaagcccacatggtcgaacacgatatcgcagccctgattggtcagctgctcgctgccggtctgcaagggagcgtccagaatctcgttcatccgccccacattggtgcgcatggcaatgaccgccgccagattctgcaacgcgccctgcatagggtcatacatccgggaagccgccatcaggaacagaaacagggtcagcacatcgatactgccctgcaccagcagcaccgagccggtgagtgccaccgatgcaatgcccagcttgagcaccatgctcgcagaggacacaaacagcgctgtttccagttctgctgcgatggactgcttttccacagcccgaattttgccggaaagaccggacagataacgctgctccgcattgctggctttcaggtcccggagagtctcgatgtactcctgaatgccgtccgcacaggccattttcgccgccatggtcttggcctgcaccttgtcctgcacccggtagctgcccaccacgatggcaacggataccgggatgacccacaatgctgccaaagccatccgtccgtcaaaggcgaacaggctcagagcaatgagcaccgtggagatgagggaaccgaatagaccggggatgaagtgggagcagtccttttccaacacctcgcagtctgccatgatggtgctggtcaggtcggcaaggtcccgcttgccgaaaaaggacaggggcagcttgcgcagtcgttccgcaagggtcaggcggcgggtaccgctctctttataggtcgtaaaataggtgccattgtactggaaccatgtggtcagcaggatcagcgcaaagcaggccgcacaccccagcagataaaaaccttttctcccgctcgtggagcctgccagcagatcttttaccaagagatacagcagcccggtgggcaacatgaatgccatgttttggaacgcacaggccagaacgccctttacaagcccttttgcgccctccggggagctggctgtggcgtgttgaatttttccgatcatcctttatccctcctttgcaaccttccactgcaccgatgcctgatactcctgccacatccgggcaaacagaccgtttttcgcgcacagttcgtcctttgtgccgaattctgcaatttgcccatcctgcaccacatagatgcagtcggcgttggctacggtagacaggcggtgtgcgatcatcagcacggttttgcccttggcaagccgggcaaaggctgcctgcaccttagcttcattgtccgggtcggcaaaagcggtggcctcgtccagaatcaggatgggcgcatttttcagcatggcgcgtgcaatggcaatgcgctgctgctcgccgccggacagatacacgcccttggtgccaatgacggtatggatacccgccgggaacttttctataatatccatgcactgcgccgctttcaacgctgccagcacctcggcttcggtggcctgcggtctgcccagacggacgttatccagaatgctgcccttgagaaggcggctgttctggaacacaaaggagatggtatccatcagctcttccttggggattgcccgcacatccgctccgcccacccggacgctgccgctctgcacatcaaagaaccggcagatcaggtttgccagcgtagattttccgccgccggagggacctacaaaagccacagtctgtcccggctggatgtccatggaaacgcccctgataacatccgtcttgccgtcatagctgaaatgcacatcccgcagcgtcacggagccgtcctgcgggtgctggggcttgctgctcaccggcacaggcgctgcatccagcacggaatcgatccgctgcagggcatcggccaccaccatcttgttttcgctcatgtacatgatcttcgtcagcgtcagggagatcaccggcgtaatgatgatatagaacagcagattcagcaggaattccggtgtcacgccgtgtgtcgtgaacagcagtccgcccgcaatcagaaaggcgaacacgccgttgactgcggcggtgtagaacatcatgggcaggcgcaggtctttggtgtaggagatgacccacttttcgtactcatcaatggtggccttgaactttttgaaggaaaacacactctgcccgaaggtcttgaccactggaatgccccggacgtattccactgcctcgttggacatggcctccaaggcgttgccgtactgccgcattttttcgaccatccgcttgccggtcatagtcgccataatgaggaaagccagcaccaccggcgcaaggctcagcagccccaacctccagtcgaacgccaacagcagcaccagcagccccaccggggtggcgatggcattgtactggtcgggcagctggtgggcaagatatgtctcggcggctccggtgctctcgtggatgatcttgcgcagcttaccgctgccgaaggtctcggcaaagcccagcggcagcactgccagatgctccgacactgccagccgcagattcgtcgccacccggaacgccgacagatgggagcacatcagcgccgcaacgtaaataaggtaagacagcaccgcgaataacactgccatccagccgtaatgggggatgttcaccgcctgcgcatagtttggcgctgcgtccagcacatcccgcaggatcttccagatgtacacaaaaggcaccagcgccaccagcgcactggccccggacaacacccacgaagcgtaggtgaaatatcggtagttcccggcgtaacccatcagccgggaaagatcagactgttttttcaattaaatcacatcctcatttgaaaagcggtatgcgcacccgcttgatccaaacgggtgcgcaaagagcaattattctgcattcgacagattttctgtggcgaacagctcaatgacattttccatggtcgcctgatcatagttctccgcgatggccgctgcgttccagtaggcgtaattgccctcgaaccagctttgcaggtcgctgagatcttctgcatagcggaactccagatgataggtggtctccatggtgtcaggtgaaaacgcaaaataggtaaactcgccggaattttcatcctcgctctgatagaagatgaagccgttttcgtttttctcatccagcagcttataggtgtgggagaaaacctcctgtccctgtgcgtccaggccggtgatcgtgtgaccgtccatcacgaacttgtcgatgccgccaagaaaatagcagttgaacgccatgctgtccggatctgcctcgtatttttccgcagcttccggaccgtaaggctccgccatgcacatccccagcagcagatccgtggtggcctccgcgttctccgcgcctaccagcggcgcggtggcatcgatccagatattccgatactcggactttgacagctccggaaacagctccacataagtgccgccgatgccggtcagataatcgtcggtcgtcgtgctctggtcagccgccggcggcgtctgttcatctgttttcgtctggccgcagccggcagccgacagcaggcagatcacgcaaagcacaaaagcagcaaatttctttttcatacagtacctcctgaaacttcttagttagtgtcctctaaccaccgcgtattctaacatgattcgcgttttcaaactactccgttttggtttctatgctccgttttactgcattcgttttatcagcgcgatagcgggacggtgtcttcccgtaccgctttttaaagctctccgaaaatttgctggcgttgtcatatcctgcgtgctgggcgatctctgtaataggcttcctgctacgaaccagctccaccgctgcttgctccagacggtattccttgatgtaatggtagacaggcataccataggtctgcttgaacagcttttgcaggtgcgacacggaaatcgcgtgctctgccgccagctgggcaagggacacacatccctcccggttcgtcagcagatgatcccgcaggtggtgcgccaacaaggtctgttccgcagagtaataggaatccatccctgattcctggggaatacgttccagaagcaggagcaattccagcaccttcagctgtaaaacggtgtgatcggcgtaggatgcactttcataaagttcccggaacacatgctcacagcgggagcctgcggagcccaccatataccacttgctgtcaagcaggttttgtttcagtgccgaaaagtccacatgaaacgctggggcatgctgcgcgatccaacaactggccgcctccgggtttacctccaaacagatcccctcgtagtagcccagcggaaagcgggattccgaactgctgccgtgaacgccgtcgtagcagctaatagccatgtcccccggcttcagcaggacgcggtcacgcatggaaaagctggtttcaaagcggccgttgatgcagaaattgacctccagcacgccgacctgtgtgcggatctccgtatacgatcccatttccagctgcatcagcatcacgctcacgccgtcaaaaatccgaaaacagtgaatttctccgtttccgtcggcgttttcaaagccgcctgtctgaccgatcgggcaggaaccgatattggtttcgtcatggtaagtaatgtgaacgatggtcaacaccgcctttctccaatggaatgccatgcgcctgtgccgatgccggcgtttactccgtgctcgtccatgtgtggatggctgcgctcacgcggcggtcaatatcctggcgtgtctgtctgcacgcttccggaaactgctttgctgcctgaaatgccagacggacgaagagacctgctcccataggcagcatgatcttcaacattccctccgggaaaacaaagtgggtgccgtgggcataaaccgccgtctcaacctcgcattcatggggcttttccgcaaggtgcttttccatacggcggatatactttgcggtatcccacagcgcatcgtcctccgcgccgatcagcagcagctttccccggatgttttcaacaggaatatattcttccggctcgatcggatgcaccgcctcggaatcatcaaacagcttgcgggagttgaccatatcgccggtgcgcttgctctcggcggcgacgcagtgccaataatcgggatgctgatagcaaaacggcatatagggcagcggcttgccccggtaggagaacagcgactcgccctcgaccggccattccttgcagccgtcccttttgccctgcatgaaaccctgccacacaaaatcgctgggcgtcagggcaatggtcagggtgatctccggaaacatggacgccgccgtcagcgccagtgttccggtggtggaggccccggcaatgccgatttttgggctgccgttggccttcagccacgaaatggccgcttctatgcgctcaagcgggtaattatgatggccgtagtcctttttcgcaggggacatggtgaggacgtttacgccgcgcccgcagagccatttcgcggccgagcgggccagccgatcctccggatcatccccgatcatggcgatcaccgcgcagcccgccccgccgtcgcacgcccaatacgcgccgtagaagccgtcaggctccacattaaagtgcaggtgcttcatgttctcccactccttttaaaaatccgtgctttgcacgctcctcagtgtcatccgattcgtcgtaagcatcatagggcgcagccgggtcaggaacccgttttttgaacggtgagcacagcttatctttatgggcgaaagcaaagtcaaaattatccgtccagcctgtgtgaccggtgagaaacagcggatgcagtctgcggctttgcagctttgcctccagcgccgccaatgacttcattgccagacgattgtcctccgccagggaggaaatgaagctgtagccgccgtcggccccgaaccagagggtatcgccggtaaagaggtatttgtcgtcgaccagatagaccatatgcccccatgtatggccggggactagaaagcactcaattttaatgccgtcaatgtcaagaatctgtccatctgtgagcagcaccctctcattgttgatggtcacctgcggcagcttgtagaggtggtagatgaccttgcggcgcacttctcctgtgagatagcggttctcggtctcgctgatatagagttttgcattccggaacagaccggggctgtctgcctccactgcacccacatggtcggtatcctggtgggtgataaaaatatgccggatggactgcgggtcgatgcccagccagcccattttttcctccagccggtcgtagttgtacccggcgtcgatcataatattggtatcgcctttgcggtagaagaagatgttcgccacccactcccgcacacaggccacatgttcgtccacccagccggtgttcaggggcttgaagatatccttaccccggtacattctgctcatttcttttttctgaaactcggtggctttctttgacatcggcagattcctccttacagcagtattccggtccccggaacacagatggccttgaaatgcagtgagttttgtctgatcttttcctttgtgatcagtcccagcacagtgccccgctcctgcgcatttgttaaattcatctaactcaagtatgtgaaagattaggttagagcaagctaactcgtactcttttgaaaagctgcatcgctgcagcctttccgcttatgcaaatagctcccggcaggcgccgcgcaccagcgtttccagcacctgcgggtaaagcgctccgatctgtccctgatgggagacagtcagaatgagcccccgtaccgtggcagccgccagcgccatgccgccctttggctgcaaaccgcccgcttccagcagtgtgcggatgtgcgtctcgtcatcgtggtagtgagccgttttgacctcctccggcagtctgtgcaggagaaactccgcgtcattttcgatgaacacgaaggcttttgcctcggagagccaccggcaggctgccagaattgccgcagctgcgcggtcagcaggaagcaacgccgcattctcctgcaaggcgttctgcgccgccgcaaagcactcggcatgaatatcctccagcatagcgaaaaacaggagttccttggagtcaaaaaacttgtagaacgaacctttggagattccgacagcatttgccagttgctccacagtggtctttcgcatcccaacggtaacgccgcagcaccgcgcttcgcggatcagattcctgcaaatcaatcgactctgttcgtctgtaaaagccatggcccacacctcgtttgaatttatgaccacatttgctttttaggtcatattataacgtcataaaatgatgctgtcaacaaaaatacaagctgctcgtcatagagctgttctgctggcatctcctgcccggtatgatcctggtcgaaaggtctcgctttcacccatccgacatgagcatacagaacaaatgcctgccaagcgggtaaccattcagatctgataaaagtgagggatcatgaccaaaaacagtggaacggcaaaactccttgttttcttcattggggatcaccgtaatgatcgtaaaaggccgcgcggggcagtttgacgccggacggaagaataaccggcaggtcttctttcccttccttcagcagttatttggacagccgtcccttgctgctgcggccacgccgtttaagatagaaaagccctccggtccttcggccagatagacgcgctccacaccctcttggattccgcagtggctatttacctcaaatctccgtgctgctttgctgtaactcaatttttctttccgcatggcttaatcaccagcttcttgaattccggtggatagcgcttgtttggtactccctccgacataataaagccccctatttgtcaggcagtatatcttactgcctgacaaatagggggctgtgcgaaatcgtatgctgtcagcatattcaccatgccctggggcacagcttttcttatcctctttcagggcttatgcaagccacccgttttacggatgatcccgacctgctgtttatgcttccggctctttgcactctttctccttgtccaagagatccgtcatgctgtccagactgatgcccagcgtggacgcgttgtgcagcagggcggaggtggtgggctgaatgacgcccgccacgcccaaagcgatgagcatgcagttgaagccgacgatgaaccggtagttccgatgaatgcggttcatcagggcctgactgattttccgcagggtcaccagctcgaaaagatcctccgaggcgatggtcacatcggcgatttcccgggcgatggcggcgccggtgttgatggcgatgcccacatccgcttcggaaagggcaggggtgtcgttgacgccgtcgccgatcatgatgaccttccggcccgccgatttctcctgccggatgaagctggccttatcctccggaagcacatcagcgtagaactgatccacgcccacctcccgggcaacggcctgggcggtcttgcgattgtcaccggtcatcatgaccaccttgctgatgccgcaggcgtgcagcgcttcaatggcagccttggcttccttccgcaggggatccgcaatgcagatctccgctgccagacggccgacaatgcacagatacaggtgagaatattcctccggcagggcattgaatttttcctcctcaccctccggaatcacgtagccctcatcctcaaaaacgaagtgagcgctgccgatgatgacctttctgtcctccacagagctggagatcccgtgggccacacatattccacctgagagtggtactccttgtggtccaggcccaatcgcttggcctctgccaccacggcattggccatggaatgggggtaatgctcctccaggcaggcggccagccgcagcatctcactggcgctgtagccatcgaaggccaccactttggccaccgtgggggtcgcgtaggtcagggtgccggtcttgtcgaacaccaccgtatcagcgttggccaccgcctccatgaagcggccgcccttgacggagatatgatagttctggctctcccgcatggcgaagagaacggcgatgggcatggacagcttcaatgcgcaggaaaagtccaccatcaggacggccagggccttcatggtattccgtgtcagaagataggtcagggccgtgccgcccagcgtatagggcaccagacggttcgccagccgggatgccttgtcctctgctgtggatttcagcttttccaattcctcgatcatcctcacgatccggtcgtaccggccgccgccggccgccttatccacccggataacgcattctccctcttctgtcaccgttccggcgtagacatagctgccggggcccttgggcaccggcatggactcaccggtaatagacgattgattgacggtggcttccccttccaccaccttgccgtccagagggatcataccgccggtgcggaccacgatgcagtccccggccttcacatctccgatagggaccagcacttcggtgccgccggccttcagccaaaccttgtccacattcaacgacatggcgcctgccaggtctgccacagacttcttgtgggtccagtcctccaggatctcgcccaggttcagcatgaacatcacggagctggcggtgtcgaaatccccccggaccatggacacagtcacggcagtagcatccagaatcgacgcagccagacggccatggagcaaagaggtcagccccgcccggatgtacttgacagagcggaacacggcaataaacgtccggatggacatcggcaggaacagcttgctgcctgcccgccgcagaacggtgaacaccagcttgtcctcgaattcccggttcagttcacgggagctatgctccggtgccagcgcctctgacttttcataggaattttactcttgagattattattgcagcaacggccagacagtgaaaaatattttcgttagcgtattgacattacaagaggacggggccttgcagtgacgatatgcggtgacctccatgtgaagtctcctggtgtaaagcagttgatggccggcggcgtggctctcatcggcatcactctggttatcctgttctccggcctctttggttaaacccaaaacctgctgtcggagcaggtaatccgactaaggtgcaagccgcttgattacatagatatgtgcaatatttcaacgatacttttgttatacatatatgatataataagtacaattgaaatgaagaattgaaaatagcagatgaagcagccagagtctattatgagaatacagtctttgaagttgtctctttggaattgaagagccggacagaaaatgaaatttctttttccgtctgcgtgagcaaaggcggcatcgcgcaggagcccgatcgaacgatctttttagagttcgtcaatggccattggaaagttgtcaatgaaggctactgatatgattgccatatcctgcgcgagtattgtaaaaatgctgtaacggattttcgaagagcaagtttcccccctattggatcggtttgaagcctatgactggtctgtactggggagccgcttgaaaataaaagaaaaggcgataacttttctggaagcgtccaaaataggaggacttcatcgtaataagtatagtaggagacacaaaagagttttatatatcgcattttgatgtgtaagtgaagcagtccgaaatgatcaagtaaagatagacgctgctatgagccatcatgcaaaacggctgggagaggcgtttaccttctctcagccgttcgttttgtttgaaacctcttctttgcagtgttccttctcatagcgaatctgctgcagcactgctctggcggcaactgcagccatgcgctgttcctcttcactaaaactggacaactcctgaaaaagctgttcggtatcctgcgccagaccgcaatcgtaattaaaaatatcattaggggcgatgtccagcaggcgaaccatcacaaacagattttcaaaacggggatttcccctgccattctctatttccagaatcgttcgtggctgaaccccgaccttttctgcaagatagtcctgtgtgatcctcttgcgcttgcgggctatgcgaacgaccttgcctaagttaatcttcgcttcctgcattataactcacctcgacataatcttataatgcagtatgacaagtatgaatgtgttaattcagcatacaaaggtgttctatacttcattaacgggaggagactttgtatgatgccttcgtagcatacggattgcagtatcttctccataaacggcggatgaagttctaccgcaagatgtatgctgcggcacttctaagtgagtttttacagcatgttggcaggatattaaacgcatattttccgaaggacaagctagcagagatattcttgacggccgttcagtgcgggatgccgcacagagagggtgtgcgtcggcttctatacgatcttgatttcaaccatggatcgctgcgcttccgtagttgggataactccatattttctcaaggcactttcgcgggttatgatatccgtgaaagtgccttttgctttgccatatcaggcaaccgacagattcgctgccgttctccgcctgcagcgctcatggcaatcaaaaatctataacagaaaggaaagtgctatgagtaagtacgttttgaagctgttggagagctataacgagcgtgaacgcaagattgcggtgcttcggtataatttggagcacccgaccacagtcagccgtgcagaacagattgaagccatgaatttcagacatgacgatagtcttgggcatagtacgggacatatttccaataagaccctttacattgcgctcaattacgaagaacaggcggaacgcatgaatgcagagtcggcacacgaaattgcaaaggaactgtttgctttggaatgtgagcagagacgcctgacatactttattggtctattggataagcggcaggctgaggtgattcgtctggtgtttgtggacggcactcccacgaaggaagttgctgcaagctttggcttgacctaccgcaccatcgaccggatcaagcgtactgccattgaaaaccttacggagatgtatgcctattccgatcggtttcaagtctgatttttgaaaatgtcctaaaaatgtccgagccgatgtacttgaagtgtcatatgacactatggtatgattaggctgataaaaaggagatgccctcgacgaacgggggcatctcctttgtcgtttgcctgtcaatcaatattatttgagagaggagttgtgtcatggctcttacgtatcaaggaaagctgtttgcagaatatcctgatgtggtatccgttaggcagatgtgcatcatgttgggcggaatcagcatgaaaacagcttacaaattgttggggaatggtgagattcaccatctgaaaattggtaagtcatttaagataccaaagatttgcgtgatcgagtatctgcttggctgacggcaaaatttcggcgcaaggatttcaaaataaagtttataggcacattggagagaacatctgcttatggtataattgatctgccattgacagataggttgtaccgctacaaaaaggaggaacaacatggtagcgggtcatctgcaaacaaaaaaaggttactattacatggtgctgaatttgaaatccgaagatggcaatcgcaagtccaaatggatttcaacagggataccggcaactgggaagaaaagtgcaaagttggcggaagaaatgttagccgaaaccagatgcacctataaagatgctgcatcaccttgtgcagtatctcccgtgatcagcagagaagatatttctttttctgactacatgatcaagtggttgggtatcatcaagaactctgtggaggtagatacatatgcgggatatgtaaacaatgttgaaaagcgaattgtcccatattttcgtggacaaagaatactgctcagagagctgactgcgctggatgtggagaatttttacagctattgcttcaatgaactgcacctaaaaggaactacggttcagcgttttcatgcgaatatccataaggcaatgaagtatgctcgtaaacacgatttaattgcctcgaatccgatggataatgtggagcggccaaagagccaaaggtatgttggagcattttattctgtgtcggaactagaaacgctctttcaggcggtgaagggtgatccttgcgagttccctgttctaatggcagccttttatggcctgcgaagaagtgagatcatgggactccggtggagggcgatcgactttgagagcaatctaattacgattgaccatacagttgttcagtgtatgtgcgatgggacgaccatcacggtcgaaaaggatcgtacaaaaaatcagtcaagctgccgctcaatgccgttggttccgcaataccgcgaccttttgctgcgtatgaaagtacggcaggaatactgtcggaagctgtgtggaaattgttatacagaaagcgagtatatctttgtaaacgatatgggagcaccctatcagccgaactatgtaacacagcatttcaagctcatcttgaggaaaaatcacttgcgcaatattcgctttcacgacttgagacatacctgcgcttcgctgctgctaaaaaatggcgtgccaatgaaggatatacaggagtggcttggacacagtagctataacacgaccgcaaatatctacgcacatctggacacatcgtcaaaaaacacttcagcatcgaagatgagcaatgttgttatcattgaaccaggcatcagcacaagcgtttgaaagaggattgtggagagaactgcggagagaactgtgaaaaaacagagcgaaatggatgcttttcatgggagaaaagaagaaacgcctgatgcctcaaatgctgagggatcaagcgtttcggaggatggtgccggtggtgggactcgaacccacacgatgtcgccatcggcggattttgaatccgctacgtctaccaattccatcacaccggcaggtgcaacaattattatatgcgatgcagggagcatttgcaagcaaaacttttcgaaaaaaggctccggcgcactgcaccggagcctttcacaatgtaagatcacacgtagcgctgattgatgacgtcgaacacgccgcgcgtcgtgaggcgcagcgttggaatgacggtcagcgccatgaacgagagcgtcataaacgggtcgaccccgcgcgagacgccgagcttgaaggcctgctccttggcgttttcgagcgcctcgttgacctcgataagcggcgcttcgctcatgatgcctgcaatctggagctggagctcgccgagcaccttgccgtcgtccatcacgacgatgccgccgccgagctcgacgacgcggttgaccgccgcggccatgtcctcctcgttcgcgccgacgacgatgatgttgtggctgtcgtgcgagatggatgtcgccaccgcgccggacttgaggccgtagcccttgatgtagccgatgccgatgtggtgcgtgttcttgtggcgctcgatgacggcaattttcaagatgtcgtcctcaacgctgatcttttcggcgtagcccgcatcggtcgtgacgatctcgccgggcaccatgccgagcaccgcgcgcgggcgggactcgataaagtccgtggcctcaaggtgcgcaacgtggaacgtctcgtgcgagcgcttgacgaggtgcggatcgatctcgggcgcttcaaacggcgtgacggtcttgccgtcgaacatcagcttgcccttcttgtagacctcaaggatgttgaagtcgtcgaaattgtcgatcacgacaaagtccgcaagaaagcccggtgcgatcgcgccgcggttattgagcaggaagtagcgcgcggcgtggtggctcgcgcatttgacggcgatgatcgggtcgacacccgccttgatggcacggcgcacgatgtagtcgatgtggcccttttcgagaagatcgttcgggtgcttgtcgtccgtgcagaacatgcagtaggtgtaatactgcggtgtgagcagcgggagcagcgcatcgaggttgcgcgcggccgtgccctcgcggatcatgatgtactgtccgcgctcgagcttggcgatggcatcctccacggtgctgcactcgtggtcggaatagacgccggcggcgatgtaggcgttcaggtcgttgcccgaaaggccgggggcgtggccgtcgatttttttgtggtgcgcctgcgcggcgacgatcttttcgagcacctgctcgtcggcgttcgcgacgccgacatagttcatcatttcggccagaccctcgacgcggttgtgctcgtagaacgagtcgatcgcgcggtaatcgagcaccgcgccggattcgtcgagcggcgttgcgggcacgcaggaggggagcatgaagcgcacgtcaacgggcagatcttccgtcgcctgcagcatatactcgatgccgtcggtgcccatgacattggcgatctcgtgcgggtcggtgatgacggtcgtggtgccgtgcggaacgacggcgttggcaaattccttgggagagacgagtgcgctctccaaatggatgtgcgcatcgacaaagccgggcagcacgagcttgccgcccatgtcgacctcgaccgcaccctcgtaatgctcgcccatgcctgcgatcagcccttcggccacggcgatgtcgccatgactgagctcgttgcagaagacgttcacatacgtcgcgttcttgagcacgaggtcggccttctgccgtcccgaggccacctcgacgacgtggagcttcttgttcagcttgcggttgatcttgcctgcgtagctttcccggtatgccatgcgttttcctccttattttgttgtgtttgaccagtttatcggatgaatcatccatcttcctcgtttattttttataggatactacgttcttttgcacttgtccagcagaaaaaactaaaatatttttagtaaaactgacgaaaagtgaggagaacgcagaagctcactgtatcataaactgtatgatggaccggacaaatacaggccgttgccgaaagattgcttttcacaaagtgctgtttacaagcatctgataatacagtataattaaacaaacagtatagagataaatgaatattttcaactaaaagacgaataaaacgcgctggcattcactgcgccgggcttgcttgaagtggcccgcacacaaaatggaggctgcggcaattttaggaccggacaaggagggggaagatatgaaaaccgagcatttctattccgcaaagggcgttttggctgcgctggggagatccgctttgtatcagctctttttcgtggcggtgcaggttttgctgccctttgtctatgggatcggtatcgctgccgatgcggcgatcaataggggagtggaccttgcacagggggcgcaggcggtggcggagcggcttcttgacggcctgtcggcgctcacgctgctatcgtgtctgatcatcgccgcggtactgctgctgtggttcctgctgcggaaaaagccgctatccgaggcggcgggccttcgtcactgctatggatggacggtgggcttctgcgccttcggcgcggtcggcctctatgtgctggtcagtctggtgcttgccctgctgccggaaagctggatggaggaatatggaaaagccatgcgcctgagcacagagacggggctgatcccggcgcttgccgtggtggccggcgcgccgcttgcggaggagctcgtgttccgcggcgtcatccagtcgcggttggaacgggccatgccggtgtggatcgcaattgtactgcaagcggtactctttggattcatccacggaacgccggtgcagatcggctacgcgtttctcatgggcctgcttttcggctatattcgctatcgcacggggagcatcctgcccacgatcgccgcgcacgccgcgttcaacgcaatgaacgacccgctggggcttttgggcggttttgcggagaagtggcagttccttgccgtcatggccgccgtatgcgcggcgggctgcgtgcgctgccgccgcggtttgagcggactaagaacagcgccggagtccgaagcaaggcctacatcgccgacggtctgcgaggagatcaccgaataacagagaaagcgcctttcaaagaaagctctttgaaaggcgctttgcgcttctgcgattgaatctttttacttcacgctgccgtcggcgttgaagacgggcagcttttcaaggaacaggatgtccttgcggtcggctgcgccgccctcggcgagaacggccatgcggcccgtaacggtgccgcccgccttttcgacgagtgcttccatcgccttgagcgagccgcccgtggagatgacatcgtcgacgagcaaaatcttcttgccgcggatgagatccgcgtcgtcagagccgagaaaaagcttctgctgggcgacggtggtgatggacttgtcctccacggaaatggggtcgggcatgtagaccttggggcccttgcgcgcgataaaatactttttcgcgccgctctggcgcgccatctcgtggatgagggggatggactttgcctcagcggtgaagaggtaatcgtagtcgatgccctcggcgagcttcaagagctcttctgcgcagcgcacagtcagctccgcgtcgccgaacatgatgaaagcaccgatataaagatcgtccgttaccttgcagatgggaaagtcgcggtcaagacccgcgacatgcatcggataagtcgccataaaaggaagctcccttcgcgttttacatctttttctgccgtttcgcgcggcgaacaggatttagtatatcttttttgcgcggattgtcaagcggtcagacctcggtgtcgccctcgggcaggatgatcgcgcaggcaatataggcgagcacgccggtaccggcggccagagcgaggaccgcccagagcacgcgcacgatcgacgggtcaatgttgaagtagtctgcgatgcctgcgcagacgccgcagatcatcttgttgttgcgggacttgtaaagacgctttctttcgtccatgatcgttctccttatccagctgcgagagcagccacggtgggtttataaacaactattatagtatatcacgtttttgcacgttgtaaagtgcggcttttccgcgttttgggcaggaaaaggggagtgcgcagaggaaaatgcgcgatattttgcgcttttgccgcttttttgccggcaaggggcaaattcccccttgcaagttccttttttctgtgatataagtaccacttagacaaatgctgtgaaagggaaaatagcgtgtttgttccgcgtagagaggaccggtcggcggctgggagccggtctgcgggatgtcgcttggttcgcccccgagcagccgcgaggaaatgcgcggccggtcagcccccgttacgggcaacgagcgcgcgcctttgggcgcgaatcagggtggtaccgcggaagaaagtctttcgtcccgagagtgtcgggaggaaaggctatttttttgcccctgccgccgatttttgaaattctgcaaatttttacctgaaaaggagaaatgatatgaaagaacaactggaagcgatccgcaaggcggcgctcgatgcgatctccgacgccggcaaggcggaggacctcgaagcgctgcgcgtccgctaccttggcaaaaaaggggagctgaccgccgttttgaagcagatgggcaagctcagcgccgaagagcgccccgtgatcgggcagctcgccaacgacgtgcgcgccaagctcgaagcgaacatcgaggaaaagacgaaagagctcgccgacaaggccatggagctcaagctcaagtccgaggccgtggacgtgaccatccccggcaagcaggaaaagatcggcgtgaagcacccgatgtatcaggtgctcgacgagatcaaggacatcttcgtcggcatgggctttgaaattctcgaagaccgcgaggtcgaacttgccgagtacaacttcacgaagctcaacgtcgaggagggccatcccgcccgcgagtggagcgacacgttctacttcaccgaggacagctcgatccttctgcgcacgcagacctctccgatgcagatccacgcgatggagacgcgcgagctgcccatccgcattctcgcccccggccgcgtgtaccgcaaggacgaggtcgacgccacgcactcgcccatgttccaccagatcgagggcatggccatcgacaagggcattacgatggcggacctcaagggcacgctcaacgaggtcgtgcgccagctctacggcgagcacacggtcacgcgcttccgcccccatcacttcccgttcaccgagccgagctgcgaaatggacattcagtgccacaagtgccacggcgcaggctgccccacctgcaagggcgagggctggatcgaggtgctcggcgccggcatgatccacccgaaggtcctcgagggctgcggcatcgactccacggtctattccggctgggcgttcggcatgggccttgagcgtctggcgctcggccacttcaagatcagcgacctgcgtttgatcttcgagaacgatgtccgcttcctcgaacagttctaatattcctcgcgaaagcggcgagccgctttctgcgatctctttcgcagggtgctgcgccgcactcgctttgctcgcacgcttgcaccctgagcggtgttttttgtgacgcgcatgtcgtcacaaaaaacgaaatttgattgttacttcttaggaggatacaaatatgatcctatcccgtaattggctcaacgaattcgttgacctcaaggatatcaccgataaggaattcaatgacgagatgacgctctccggctcgaaggtcgagaccatcgagcgtcccgacgagaacctcaagaacgtggtcgtcggcaaaattctcgagatgaagcgccatgaaaactccgaccacatgtgggtctgccagatcgacgtcggtcaggccgagcccgtgcagatcgttaccggcgcgtggaacatccacgtgggcgactatgtccccgcggcgctgcatggcgcgcatctgccgggcggtgtgaagatcgaaaagggcaagctgcgcggcgtcgagtcgaacggcatgctctgctcgctcaaggagcttggcatgacggcggagcatgacttcccctatgccgtcatcacgcccgcggcgcttctgaacgactatcatcccatcgaccccgcgaagccctccatccccgctgacatcaagcccggcgacaaggtctacggccctgtgctctgcggccgcgtcgaggcggtggagagcgttgacgtcggctataatgtccgcgtgaacgacggcacagtcacccgtgcggcgaagactgtctgctcgaacctccacgagggcgaccttgtcgcgtacaacacgaagagcgacacgatctgcacgctcgaggacctgcacgccgagcagaaggagttccctcactgcatcgccgacggtatctttgtcttacaggaagaggacgccgagccgggcctcaacatggcgcacatcctcggctttgacgattccatcgtcgagtttgagatcacgccgaaccgccccgactgcctttccgtcatcggccttgcccgcgaggcgagcgcgacgttcaagcgcccccttaagctgcacacgcccgagccgcacggctgcggcggcagcatcgccgaccttgtcgacatcgacattgaggacggcgacctctgcccgcgctacaccgcgcgcatggtgaaaaacgtcaagatcgctccgtctccgcgctggatgcgcgagagattgcgcaacagcggcgtgcgccccatcaacaacatcgtcgatatcacgaactatgtgatgctcgaatacggccagccgatgcacgcctttgacttcagctgcgtcgaaggcggccacatcatcgtgcgcaccgcgcgcgagggcgagaccatccagacgctcgacggcaacgagcgcaagctgacggagaacatgctctgcatctgcgacgagcacaagcccgtctgtgtcgcgggcgtcatgggcggcgcgaacagcgagatcgtcggcgacacggcgatggtgctctttgagtccgctaacttcaacggcgtttccgtgcgccgcacggccagcgccctcggcatgcgcaccgacgcctcctcccgctatgaaaagggcctcgacatgatgaacaccatcaaggccgtcgagcgagcctgcgagctcgtggagctgctcggctgcggcgaggtcgtcgacggcgtgatggacgtggtcgccaaggaaaaggcccccacggtcgtcaagctcgaacccgacaagatcaacgccctgctcggcacggaactcagcgaagacctgatgcgcgaaattcttgtctccctcggctttatcctgaatggcgacgacatctacgtgccgtcctggcgcggcgacgtcgagcattacagcgacattgccgaagaggtcgcgcgcttctacggctacaataagattccctgcacgctcatgcgcggcgagaccacgcgcggcggctttagcgagcagcagcgcttcgaccgtgccatcggcggcgctgtgcgcgcgctgggctacgatgagatcatcacctattccttcatcagcccgacctattacgataagatccgcatgccgaaggattcctcgctgcgcaattccctgaagattttgaacccgctgggcgaggatacctccatcatgcgcacgacgatcctgccgagcatgctcgagatcattgcccgcaaccacagctaccgcaacaagtccgcccgcctctatgagctcggcaaaatttacctgccgcgcgaggatggccttgctgacgagccgaagtacctctccctcggcgcttacggcgacggcgtggacttcttctccttcaagggcagcatcgagacgctgctgcacgagctgcgcatcacggatgtcaagtacgtcgcctgcaccgacaatgattcttatcaccccggccgctgcgcgaaggtgtatgcgggcgagacgtatctcggcgtgttcggccagatccatccgctcgtcgcggcgaactacggcatggacaccgaggtctacaccgcagagctgagcttcgatgcgatgtatgaaaagcgcggcgacatccctgtctaccagccgcttccgaagttccccgccgtcacgcgcgacatcgccgtcgtgtgcgacgaggccgtcacggtcggcgcgcttgaagagagcatccgccgcggcgcgaagggccttttgaaggatgtgtcgctgttcgatatttaccgcggccccggcgtggccatcggcaagaagagcgtggcgttcaaccttgttctgcgcgcggacgaccgcagcctgaccggcgaagaggcagatgaggacgtccagtccatcctcgcagcgctcaaggccgaccacaacgcggtgctccgctgagaattccttaaggaaacattacgatttggttacagttgacagcgctctctttactttttgagattgcgttgctatactgtctgcatggaaaggaggggctctcccaatggaagaatttacccgaaagtttaatgttgtgcaggaaaaggacgctgagatccgtcatattctgaccaccgtttatgccgcgctggaggataagggctataatcccatcaaccagatcgtgggctacatcctgtcggaggaccccacctatatcacgaaccataacaacgcccgcacgctgatccgcaagctggatcgcgacgagctgctgcaaacgcttgtgcgcagctacctcggaaagtaagcgaaaaccgtcaaaataacgaccctcggagaccgtgaacgcggcctccgagggtttgttgcattttttcgccccacttttattgacaaggggggtaaaaaatgctatactgcaaaaagttacaaaacggttacaaagttacaaattggttacaaggacaggagtgagtcagatggcagaagctacggaaggtctcgtttaccgcggacacccgctgcgccgtgtggataatctcatctactacggctcgatggcggataaatatatcgtgatgatgcaggtgttggataccacgccgctcaaggatatcacgcttgccaagcgcgtttccattcagttgcagatgacggacgcaagcctccgttcgcgcgaccgtgtggtccgctcgacggaaaaaggaagcctcggcgaggcgatggaatttgccaccatctggcttgagcgcgcgctgagcggcaagatgtaaatagccgccgcgcagccccctgattttattcacgaaaggatgactccgctatgagaaaccattcacgatgcttatcgttcctgctttcgggcattctctccgtcagcctgctcgcgccgctctcttcggcgcaggccgcttacgacggttcgatccgcaaccttgttgaccgcgtgacggtgctgacggaatccgttcagaccgagagcgcgaacgaagaagagctcgccaagctcgatgagatgcaggcagagcttgaagacaaggctgacgccaaggaagacgtgagcgagaccgagaccgtctccatggtcgtcacgggcggcacgatcaacgtgcgcacgggccccggcacaaattacgacaagatcacgcaggtggtcagcggcaagcaggtcaccgtcgtcggtgagtcgaacggctggtatcaggtcacgtttgactcgacgaccggctggctgctcggtgaatatctgcgcgatcctgccgacctcgacggcacggtgggcgcgaaggtcgtctccatggcgatgcccttcctcggcacgcgctaccgctccggcggcgcgtcccccaacggctttgactgctcgggcttcacgatgtatctctacgcgcagctcggctactccctgccgcactcggcgaccgcccagtataagaactgcggctacgccgtcgccaaatccgatttgcagcccggtgatctggtgttcttctcggattcctcacacgccatcggccacgtcggcatctacatcggcaatggtcagatcatccacgcgcgctacagcgttggcaaggtcatgatcgacagcctgtccgcgagctactatgcttcccgctacgtcggcgcgaagcgcatcgcgtaaaagtacataaagaaagcggaacagcttaggctgttccgcttttttacttcatcaaaaagcagcgaagctgcttcttgatgagagagcttcaggaaatggtgctcaccgcgccatttcctgcaaagtgtcgctgcggacgcgcgtgtcgtcctccgcgacggatcaaaatactttgccgcctgcgggcggcaaatgaagtcgattgaccgttggccttgccttgtgcagataacgcgagctgttactcaacagttgtttcggtgtcgctttcctcggccttctccgcctccgcggcgaggatggcttctgcttcggacttggcttcggcgaggacttttttctcgctctttgttttgagctgcttttcgtcaaactgtgcccagaggtcgggacggcggagcattgtgcgcttgtagctctcctttttgcgccatttggctacgttttcgtggtggccggagagcagcacgtccggcacgcggcggccatgccattcatcggggcgggaatactgcggatactccaaaagcccagcccagtgggactcctcggtgaagcattcctcctcgggcagcacgcccgggaccatgcggcagatggcgtccgtcacggccatggcgggaatttcgccgcccgtgacgacgaagtcgcccatcgagagctcttcgtccacgcactcgtcgataaagcgctggtcaatgccctcgtagtggccgcagactaagatgagatggtcatagttgtccttcagctcacgcgccacgctctgcgtgaatgtgcgcccacagggggagaggtagatcgtatgcccgcggctgccagcctcctcgcacacatgcgcccagcagcggtataaggggtcggcctgcatcaccgcgccgcgcccgccgccgtaggggtagtcgtcgacctgcatctgcttgttcgtcgtgtagtcgcggatctggtgcgtcttgatcgtgatgtagccgcgctcctgcgcgcggccgaggatgctgacgttcatcatcgcgtcgaccgaagcggggaagagtgttaaaatatcaatcctcatcggtctctaacccctcgatcatatgcacgctgatctcgcgcgattcctcgtcgatgtccgtgatgaagatatccttcaccgcggggatgagataggtcttctcctcgcctttgaccttgtagagcttgtgggcggggtaggagagcacatccaccaccgtgccgatatacgtgtgggggaagtagttgtaaacgttcatgccgatgatctcggcgtcgaagtgctcgccgggcttgagctggacatcattgcggcggatggagagcaccttgcgcttgagcgcggcggcagcatccatgtcgtcgacctcgggcagcttcatgagcaccatgtcgccctgcacgcgcttgctcgtcgggcggaagggcgcaccgtccatgtagaacgttttgaacccgcacaaaagctcgggacttacgtcccagggctgtactttgacctcgccgcgcacgccgtgcgtgttcacgatctggccgacttcgatatattccgggcgcgcgctcggctgcggcgcgctctttttggaaaagagacccattgtcatgctcctttgttttgttctatccatccagtatagcggaatcggcgggggatggcaagaataaaaaacgttcccgagagcttctcgggaacgtttttgcagttcagtctacgatgtcgacagacacctttacgccggtgcgctgagcataggaacggacgaccgtgcggatctccttggcaatgcggccctgacggccgatgaccttgcccatatcgtcaggtgcgacgcgcagctccaacgtaagctcgtccgcgccctgcttctccgtgacggtgacgtcatcgggatgctcaacaaggctgcgggcgatgtagagcagcaagtctttcatttcttgcaccccgggtcttacagcgcgttgactttcttcagcagcgcacggacagtgtcggtgggctgagcgccggtcttgatccactcctgagcgcgctcagcgtcgatcttgatctcggcgggggagacgcagggattgtaggtgccgatctcttcgatgaagcggccgtcgcggggataacgggaatcagcgacgacaacacgatagaaaggagccttcttggcgcccattctgcgcagacgaattttaaccatggttactacctccaaaaataatgtaaatgattttgtattatgatgaaatgcttgtgcacttatcaacggaaattacttgaagcgtttcttgcgcccgaaaccgcgcatccggccgccgccgaaaccgcccatgccctttggcatcttgccgccgcgcgtgacctgcttgatcatgctctgcatcatctcaaactgcttgagcaggcggttgacatccacgacctcgagtccgcagccggcagcgatacgctttttgcggctggcaccgagcaccgcgggattctcgcgctcgtagggcgtcatcgagaggatgatcgcctcggtgtgcgccatcatcttggggtcaagctcggcatttgccatctgcttgccgagctggccgggcatcatgcccgcgagctgttcaaagctgcccatgctcttgagctggacgagctggtcgtaataatcagagagggtgaagcggttctttttgagcttttcttcgagctttttcgccttttcctcgtcgatgctctgctcggcgcgctcgatgaacgacagcacgtcgcccatgccgaggatgcgctgcgccatgcggtcggggtggaagggctcgatcatgtcgagcttttcgcccgtgcccatgaacttgatgggcttgccggtcgccgcgcggatcgagagggctgcgccgccgcgggcgtcgccgtcgagcttcgtgagcacgacgccgtcgatgccgagtgcctcatcaaaggcggtggcggcgttcacggcgtcctgaccggtcatcgcgtcgacgacgagcaggatctcggtcggcttgacggcggccttgatgcgcttgagctcgtccatcagcgcttcgtcgatgtgcaggcggcctgcggtatcgaggaagaccatgtcgttgccgtggtcaccggcgtacttgacggcctcctgcgcgatctgaacgggatcgatctgacccatttcgaaaacgggaatattcaattgcttgccgacgacctgtaactgcgtgatggccgcgggacggtacacgtcgcacgcggtgagcagcggacggtggccctgcttgcggaagtagcccgcgagcttggcgacgttcgtcgtcttaccggcgccctgtaagccgaccatcatgacgaccgtcggcggcttggaggcgaaggtcagcttcgcattggcaccgcccatgagcgcggtgagctcttcgctgacgatcttgatgacctgctgggcaggggtcaggctgtcgagcacctcggcaccgacagcgcgctcggacacggtcttgacaaagtccttgacgaccttgtagctcacgtctgcttcgaggagcgccaggcgcacctcacgcattgcgagcttgatgtcctcttcgctcaggcggcccttgccgcgcaggtgtttgaatgtggcgttgagcttttcgctcagtccttcaaatgccatggatgtattactccttgagtgccgccgcctcggcctcgatcacgccggcaagctcttcgagctggcggtcctcataccggcggaagttgagctgcttgatctgctcggccgcgtccgtgatcttttccacgtggggctgaagctgcatgaagcgcttgatgagccccgtcttgtcttcgatctcggtcatgtagttctccgcgcgcacgatgacgtcgcgcacgccctgacgggagatgccgtagttctcggcaatttcggagagcgacaggtcctcgttatagtagagatcgtagaattccttctggcggtcggtgagaagctccccataaaagtcgaagagcatcgtcatacgaaaggtctggtttttcacgggaagttcctccttgtgcagattcttatgtaaagttttatgcctttacaacatgaatcagtttacatgattttatcaaaattgtcaaggaaaaatcgcaagaaaaacgtcatgcgagcagaaaattcttccgtttttgcgccggaaagtgcggtgtaagcagaaaagagtggaattgttcacagtttcgtggtatcctaaggacaaattctgaaaaatgaccacaggaggaatccgtgatggaaccggtcagacttgagatcgcacccgaggtggacctcgactatgtgcgctcggataaattcaaaacggggacgctgagcgtgcaactcatcacgccgatcaacgaaaaaacggcgagctttggcgcgctgctgccgagcgtgctgcgccgcggcacgatgtcgcaccccgatatgcgctcactttccaccgcgctcgacctgctctatggctcgtccatcggctgcacggtacgcaagaagggcgagaaccagtgcatcggctttgccgcgagcttcatcgacgaggaatttgtcccaggtggagaaaagctgctcgagccgatgtgcgaccttttgggcgagctgctgctcgaccctgtgacgcgcaacggccgcttcctgaacgactatgtcgaaagcgagaagcagaacctcatcgacgccatccgcggcatcatcaacgacaagcgcgactacgcagacctgcgcttacttcaggagatgtgccgcggcgagcgctacggggtggacaagttcggctccatcgcgcgcgttgagaagatcacgaaccagacgcttttccgctactatcaggagttgctctccaccgcacacttagagctcttctactgcggcagcgccgagcgtgagcgcgtggaggaggccatctcccgcgcgtttgcgccgctccagcgcgggcatgtcgtgccgccggtcatcgcggaaaagaagagtgcgccggagacgccgcgagagatcaccgagcgcatggacgtgacgcagggcaagctttcgatgggctggcgtgtcggcacgaacgacgcgagcgcgatgatgctcgcaaacctcatcttcggcggctacagcaactccaagctctttttgaacgtgcgcgagaagctctccctctgctattatgcctcgtcttcgtatcatcgatccaagggcatcgtcacggtgtcgtccggcatcgagcacggggatgtggagaccgccaagcgtgaaattcttgcccagcttgccgccgtgcagcgcggcgaatttgaggaatgggaggtcgagggcgcgagagcatgcctgatcgcgtcgctcgaatcgcgcggcgacagcgcgggccgcatggaggaaaacgccctcggtcaggcggccacgggcatccgcgagacggcggatgagctcatcgcggcgctgcgcgccgtgacgaacgagcgcatcgccgaggccgcgcagagcatgacgcttgacacggtgtatttcctgacaggggaggacagcaaggatgaatgagaaaagctacccccgcatcggggaaacggtcctggaaaagacgctgccgaacggcttgaagatattcatcgtccctaagccccagcaccgcaaaaaatacgcctttttcgccacgcgctacggtgggatggacatgcagttcatccgaaacggtgaaaagtgcgacacgcccgcgggcatcgcgcactatttggagcacaagatgttcgacacgaaggacggcaacgccctacaggtactctcgcaaaacggcgcagagccgaacgcctttacctccaacgcgatgacgggctattactttgactgcaccgagcattttgaagaaaacctgcgcatcctgctctcgtttgtttccgttccgtactttacgtacgaaagcgtggaaaaggaacgcggcatcatcggtcaggagatccgcatggtcgaggattcgcccgactggcaggtctacgaaaggctccttgcctgcctgtaccgctcgtcgccagcgcgcgtgcccatcgccggcacggtcgagagcatcgcgggcatcacggcggaaacgctgtacgactgccaccacgcgttctactgtccgtccaatatggcgctgtgcgttgttggcaacgtcgatccccatgcggtgatcgcgctggccgaggaggtcttgccccgcgaacgcggcgaggagatcgcgcgctgctatggcgaggaagaggacggcactgccgcgcagaaggagaccgtcacgcagatggaggtcgcgctgccgcagtttttagtcggctttaagtgcgagacgaacgagggcgacctcctgcgccagtcgctcatcggcgagatggcgagcgacgtgctgctcggcgattcgtcgccgctctaccagcgactttatgacgaaggactcatcaattcgagctttggcggcggctttgaccagctcccgggcgtcgcggtgctgtgcgcgggcggcgagagcgagcagccgcagcaggtgagcgacgcgatcttggaagaggcgcagcgcctcgcgcgcgagggcatcgaccctgactttttcgagcagattcgccgcgcgagcttcggcgcgacgctgcgcgcgctcaactcgtttgaaaatatcgccatctccatggcggacggctacttccgcggcttcgatgcgctccggttccccgaggcgtacgcgagcatcgaaaaagcggatgtcgagcgcttcctgcgcgaaaacctgacggacagccgccgcgccatctccatcatcgaacccaagaaagaaggataacgatcccatgagcttttctgacgcgcccatcagctttcccggccttttcggcgactggcagttcaccgtgccgtccaaggcattgaacatcggcaacggcatctactggtacggcatcatcatcgccgcgggcatgctgctgggactctatttctgcatgaagcaggcgcacaaatacggcctgaccgaggacaatgtcatcgacacggtactctgggctatcccgttttccatcatcggtgcgcgcatttactatgtgctcttttaccttgacctgttccgcaacagcgacggctcaatcaactggtcgtcgacctaccgcatctgggacggcggccttgccatctacggtggtgtcatcgcgggcttattgacggcgtatatcctgagccgctgcaaaaagctttcgttctgggcgctgacggattgctgcgtgcagggccttttcatcggccaggccatcggccgttggggcaactttatgaatagagaggccttcggcgcggcgacggagcttccctggcgcatgcggctctggacgtcggccacgacgtatatggatgtacaccctacgtttctttacgagagcctgtggaatgtgatcggtctgctgctgctttattttgtcgtgtcccgcgcccgccgcttcgacggggagaacacctgcttttacttcatctggtatggtctcggccgtttctggatcgaggggctgcgcaccgacagtctgtatcttttccactggacgctgtttggtcagcgcatccgcgtgtcgcaggcgttgtcgctcgtgatggtgctcgtgtgcgcagggatcctcgtctatcagttcaaggtcaaaaaggccgacgggtcgaatctgtttgtcaagcgtgtgcagcagacgacggaggcggaagaagccgccgctgagcctaccgcgccggacgagaagcagtaagctctatgcactatcacatcgacaaaaccgccgcgcagagcgcgtatttgcagctctatcaccagctgcggcgcgacatcgtcagcggtgtttacccgctgggaacgaaaatgcccagcaagcgcctgatcgcaacagagacaggcgtgagtgtcatcacagtcgagcatgcgctggcgatcctatgcgacgaggggtatttggaatcccgcgagcgcagcggctttttcgtgagcttcgccgcggcggactgcttcccggtctccgagacggagaccgagcgccgcatgaccgtttctcacgggacggaggatgaatttccgttcccgtcgctcgccaagacgatgcggcgtgtactcagcgagtacggcgagagtattctcgtcaagtcgccgaacaacggctgcgccgagctgcgcggcaccattgcggcgtatctctcccgctcgcgcggcatcagcgtccagccgggacagatcgtgatcggctcgggcgcggaatacctctacggactcatcgtgcagcttttggggcgcgagcgcgtgtttgcgctcgaagacccgtcttacgacaagatccgcagagtctatcaggcgcacggcgtcacgtgcgagatgctgcgcctcggcagcgatggcatccgttccgatgagctttcccgcgcgagcgcgacggtgctgcatgtcacgccgttccacagcttcccgagtctggtgaccgccagcgcgggcaaacgccgcgaatatctccgctgggcggaggagcgcggcggctacattgtagaggacgacttcgactcggaattcagcgtgtcgagcaagagcgaggatacgctcttcgccctcgagcccgagcgctcggtcatctacatgaatacgttctccaagaccatcgcgccgtcgatgcgcgtgggctacatggtgctgccgcccgtgctttccaaacagttccgccgcgaggtgggattctattcctgcaccgtgccggtctttgagcagtatgtgcttgccgagctcatcggcagcggcgacttcgagcgccacatcaaccgcatccgccgcagacggcgaaaagaatgaaaaagcggcggccgccgctttcaaaaagtttgaaaaatcgcttgacgcgaaaaaatctttgtgctatacttccatttgcatttgaacgaatgcgctggtgtagctcagtcggtagagcagctgattcgtaatcagcaggtcatgtgttcgagtcacaccaccagctccaaaaagcatcgaaaacttcggttttcgatgcttttttgttgcaaaaacgctgaaaatggtgtgggtcaaaatgtgggtcaactgctgacccacaccctgacccacaagtggaaatgcgcggaaagaaccaaagagcaccggagaggaaattgcttcctttccggtgctctgcttgcctgtgggacttatcggatctgcgccatgaagctacccattttctctgcggccttttgctgcatctgccgtgtggcgtgggtgtaggtgcggagcgtaaagccagcgtcgtagtggcccagcatgctgctgacggtttttacatccacgccattctgtagtgccagcgttgcgaaggtgtgtctgaggtcgtgaaatctgatgtgcggcagcccggcatccttcaggatcttcttgtgcaggtttacgacggagtctgggtagtacatctcgccggttgccggcgaggggaacatgtagggattctcgggatgctttttgtgttcggcaaccagcaggtcaacagccccttgcggtatgctgaccttgcggactgaagtctctgttttggggcgggagagcgtcagttcgccattgggattctttatatactgcttgctgacggagatggttttgttttggatgtcgaggtcgctccagagaagcgccgtgatctcgcccttccgcaagcccgtgaccagctccagatagaacatggggagcagtcctctcctgtcagcagcttccagataatccttgatgtgctcgggcggaagaatctgcatttcgattttttgaaccttcggcgcgatgcagtcctcggtcgggttccgcaggatcaggcgctccttgaccgcccgctcgaaagcgttgtgcagcatcaggtgaaggcttcgcacggtcatactgctgagccctggattgccatgaccgctctttcgggcgatacgtccgttttccatcagatccttgtagagcttttgtaagtcatgggcagtcaactttgtcagcttgatgctgccgatgcggggaatcgtgtactgctcgaccatcagatggtagcggtctgccgtggcaactcttatgtttggcttggcgtaaatgtcgtaccagctacgcagccaagttgctaccgtgtactcatccgcacggctgacatcgattcctctggtagcctccattgcggcactgagctttgccttgcattccgcctgcgttttaccaagtacatttttgatgatgcgctttccggtttcggggtggtagcctgcggtgtaacgcccctcccaacgcccgtctgcgcgtttgcgaatattgccctcgccgttggcgcgctttttagccattcgtggtcatctcctttgctttttcttcctcgtcggcatcgaaagagtagggcgttcccagctctccggcgataccggccgccagcttgaagcccgccgtgaagctcatcaacttggcttcgaccagcaacgcgttctgtgcgtccaacagccgcagtagtttcttacgctccgtggcgtccatgtcccgccgcagttccacttgggcgtaatcaatctgagcgtctaattcgccgtgttcctgacggtcgaaacgcttttgcagggctttcatgtagtcatacattgtggcacctccttttggtagccacaacacataccacaacccggcgcacaaagctactacttttgcaaatgtttctttgactattgcggcgcaaagaatacgtttccaaacctgttcacatgtgcatccgcatcgagcagccttttttcgtcgcggggagtgtactgcgctcatccgccagcagctccacgccgggacgggtagcgacatagcgtgtgcgctgggccagctttgccgcgttctgtccgcccttgaggtagggcgagatcagtacgatccgggccatgtgtcatccggctctatgcgccgctggctccgcaccgcgctttcaaaactcacctgaccgttggtgcgcttcacctcgtccacggcgtaggcccgcagctcccgcgtgtggatcgggtcggcgcggaagtgcgcggcgatggtgtggcacagcatattcagttccaccgcgcacttgaaaagaatgcggcagagccgattgttgttgtcgtccagcgtaccctgaatggctgtcaggatggcccgagagatgtaggtcgtgttgtcctcggtgccgagataacccatgtaaaagcgcagggccttatctacgaattcgctgcggctttgacagttatctgcttccaaccagccgtccatgcggctgatcacgctggggcgcagccagatcgtggtgcttttcttgttatcatccatattttttctttcctttctgtgacgtcggtcaaaatcgtcgcaaagccctgcaaacacgggacttttccgaatgaccgactgcgattgttctgtaaaaccgccaaaccgacggtggttggcgtttccctgaaaagccccgcactgcggggctttgtgggcgggctgcgggcgcttgcgactgcggccctttatcttgttatattttcgaacggggatatctccccacaaaacatcttcaaaaccggtatcaacgccccttgagggagcgatgatataatatcctcatgcggacagagaatttcctgcttctatctttgtagccaagtctactgcgcacagactggaacctctgccctgtgggatgtcacttatgagccggatgttggggcgatgaatcgctttcttctaatctcgcaacaggttgtgaccttcagcagcacgaggaatgtccgtaatttgaacatgagaggagcctgcactatgtacatcgttgggatcgacatcgccaagaggaagcacgaggcagcggtgattgacggcgagggcgccgtcatcatcaagtcgttttnatcgctttcttctaatctcgcaacaggttgtgaccttcagcagcacgaggaatgtccgtaatttgaacatgagaggagcctgcactatgtacatcgttgggatcgacatcgccaagaggaagcacgaggcagcggtgattgacggcgagggcgccgtcatcatcaagtcgttttccttcaccaacaactgctccgggtacaatcggctgctggccatgctcaccaaggccaagctgccgcttgacgaggtttcctttgcaatggaggccaccggacactactggctcgctctttttaccagacttcagaaggagggcttccgtgttcaggtcatcaacccggtgcagaccaactccatccgcagcttctacatccgtcaggccaaaacagntgacgaggtttcctttgcaatggaggccaccggacactactggctcgctctttttaccagacttcagaaggagggcttccgtgttcaggtcatcaacccggtgcagaccaactccatccgcagcttctacatccgtcaggccaaaacagatccgcgggacgccctgctcatcgcagaggtgattcgtttcggacacttctccgagtctaccctgcatcccgaaaacatttatgagctgcgggaactgtgccgtggacggcacgccatcgtttccatgcaggcggacgttaagcgaaaggtcgttgccctgctggatca

SEQ ID NO: 25 - DNA, 288609 bp, Colonithrix sana
  source 1..288609: mol_type = genomic DNA
  misc_feature 30566: note = n is a, c, g, or t
  misc_feature 32119: note = n is a, c, g, or t
acgtaggtctgtaccgccataaaaagctggccgacgttggattccttgcagtcgttgaggtaggtcatcatccacttgacattctcaacggtcgcggcatccatctcgctgagaccactgtttgtgagcgccgactgcaatacggcatctgcatctgcaccggtgccggacgtccaggtaaacgaatttaagtacgatggggttgcgtaatggtatccaagtccgctgtccatgcagtacacgagcttaccgtccacgagcggcgggcggtagctgtatggggtaccgttggcgagcaggcgggtgctccaatatgcctgattctgtgtgatctggatgccggagccggtcttcgacacagcgaaggccgaagtcggcagcaggctcaagattgtcaccagcgcaagcaataatgacaagaattttgttcgaatcgttttcaaggttattcctccttttgtaaaagaaaagcaggccgagtaaactcggtctgctttgtttgtatatcgtttaattttcagttttctgcaagctgctcctcgcagaactgcttcagggtgggaatgtcattgaccgcggtctcccaaatgatctcgcgattcatgctgccgtagctgtgcgcgacaaggtttcgcattcccttcatcggtccccactgcacgcggctgctggtcgctttgcggtattcttcggataatccgccgctcagctcaccgatctgcaaaatggaaaatgcaatggaacgctgataatctgcatcctgatcaaagaccgcaaagccttctccatagcgttcgatggtcttgcggatctcttcgcagtaatcgcggatatgctggatgcgctggcggtcaggctgcgtcatatacattcagtttctccttcatcacggtttcacggaacatttcctcgctgggcatttgcgcacgttgttccagcgcgctgacagtaatcaaatcgatcggcttttgcagcgccgcttcaaggtcgcaatacagtgctcccaaagagagaagactgcgcaggttcgttccgctggtatcgaccagcaggtcgatatcgctgtcctcacgggcttcacctcttgcgtaagagccaaagaggaatactgctttcacaccgtactgctttgccaccggcgcgattcgctgctgaatttcgtagattgaataaatcataagcactcctcctttgatttcattatacccaacaaacgccggaatgtccacgtttttgttctgacagctctgatatatcatttcattgcagtcgtatccacccaagtgacttcacagccgtccagcaggaagacctgcacgcagtaccagcagtcaaggccgttttggttaacgcctcgcgccagtccgacgccgatctcgccgtagcgggagcttgtcatgttgtctgcgtgagccttggaattggaccacaggttgaccaccgcctcagagagcgttttgtgctgttgctcgaggtataactccgatatactgtgaatattttctccagtgtatttgctgtcggtgacggtattgctcttgcgcccatccggacgggtgtgagagtagacgccgctggcggccatctcatccgcgcgaacctgcgccgcctgcatgagcttgtcgttgacgcgcagcgcggcaacgcctttttgatgccgtagcgcattggtgcggtcaatgatgtcctgctttgcagcggcgacatctgtctgcgcaggctgctccacgggctttgtctccgcagacgttaccggcgcttcgccggtgtacggctttttcgattcgacctgtacacatttggcgtcgctgtcccagtagacattgaagtcgaccgctctgccgacgtcgcgcagcataacgtaattgttgccgttgatgttgtacgccgtcaggtgtacttcctgtccatccacataaatgcggttggtgctgcgctccgctgtgatcccggcagccaaaacggatgacccgccaaaaagtgtaatgccaatcaaaataccggcaattaagtaaaggctcttcttcatttgactacgctccctttcgataaaatgtagtggttacactggcagtcatgcggcaggtatccggattgaaaacgcagcgctcaaactcgtaaatgccaagccgctcagcctgctccgctacttccgcaggaagatcgaccgtaatgtccatttggactctgatctcatcgtccttcctcggggacttaaattcctgtatcaaccaaatacttccttttgtacttctattctccggagtggtttgagaataatacagaaatcatgctatgtcaaaggtttatttgaaatgcctacgccgataaaacgtacctggagaaagcctttgtgctgcaagggttttacttcacctctacggcctgaacgcaaactcttttgctgggctgatttgcaagacaggtggtgatggtaatacgattatcggatgtcgcctgtaggtagctccagtctgaactggcaattgtctctaccgttacaacctcataggtacgggttccataaaccgtcgtgtaagtgatcgtatcaccatccttcaagtttttgatgctgccgatggtgtacttggcgccgcggttatgcccgcaaacaccaatattcccatcccacccggaagtggagctataatggccgagtccctttgccatgctggtgttggtttcgccctcccataccttcatattgatgttcaaggatgggattttcagcgtaccgatactgccatccttgcgttccataccgtcaacgcttgtataggcggaaggctggtagctggttgatggaatctgcggttcctgctgaatcggattcgtgatattactctcgataccgcttcctccgatagagcctaccaagccaggaaatcgaaccttttccatacatccgacacttgtattgctggacactccatagggtaatgccggccactggtagtccgttgcattgctcccaccataattgtatttagcaccatagagagattcatagctcgtggagggataatattcggtatcctctacgccgtcaaagttgtactctaatgcctctgcgcagattcccagcgaaagcgttaagcaggcggtgagagccgtgacaaaccagcactttttactcttcatgttcatcttcctcctctgaaaattcttcgtgataaactgtatcctcttgacttctcttgtggttacgccaaatgagtacaacggcagtaattgcaagagcgataacaacaaggaaaattaaaataatgggaaaattctctgtgcttttggcaactactcgctgcaggatactcgacggtgtaccggtatagatcaccgtataagtaacactctcgataccctctgcaacgatatcaccgatatattttgcagtcgtaacatatccggtcgccgcgcgataagatgctctccctgcgtaggtggcaacagctttgtactgagcaggcacgagaatatcatcgaccaacgacgttccctgcacctgccaatctaccgattggagctgaactgttacgccattttttgtagtcgtatcagggacgtaagccatgtcgttcgtatcgagattgtcaatttctttggtcgcactgacggtgtagctcttcgttgtgtaaccagacgctaccgtgctgatcgtcgagtggtcaagatagagcgttcctcgaaattctccgtcgtcatactcgatggacggggataatgccttcagcaccacagacagatcactcttctccgtgtccgctgttacggtctcagtgtgatgctccttctccgaataggactgctcttccttcgtcatggacgaataggtataagtatatccgtcgtattcaaaaacatcatcgatcagcgactgcggatctgtgtccggtgcgaccgtatagatcttaatatactgccgtacaccattgatgtcctgaatggtcgtattagtcggtacttccattgcaaaagcactgatggagcatgcagcagaaaccatcagggcgatacaggtactaatgatttttttcatgtgcgttgtgtcctccgtttcataatgataattccggcaacaacaattgcggccgaaatgcggtaaatcagctttttcacgccgtggcctccctttgaaaatcgaagttgcttgtacgatccggatgctgctggatatctgacagtatgtacagagattgatccagagctttcatcatatcccgaggctgccgcttgataaaggatgtcaataaaataacatcctcattctgcaccgtgaaaacgattcgaatgaggactttgcccttttcacgcagttcatacatctgactgtatctctccagtgaaaagtgcttaaaatgaggttcctttagctcgcaggcaggaagatttctcagtcgaaagatttgccacaggagcttagccttgagtttcccgtccagagcatcaatgaaagcgtaaagcggaggttccactccgggcgggcagtagactttaattgctcgcataaatcacatcacctccagttcttttaaatattccctcagataactgagaaatccttcaatgaatggcgacaccaataatttgctgccggagatccaccagatagcttctgggacaggatggttcatcgcgtcatactctgagcagatcattaagactactctctgcgcctctacattttcagacttacagaaagcctgacatatcctggaaacggtttgcatttcaacataagaatcacaaagggcgtcaaagaataggcctgcgcaaagatgggcgaggaaatttactgcatccgcattcacatccccgttgcaatcaagcagccccatgtgtctgtgcctctgtgcagccgcctcatcaaacgggccaacgctgcggttccataggttgttcatttttcacctccttcaaaaagaaaggcccggcacctcacggtgtcgagcctttcagcaaattattcaattattttaagatcttacgtggaagcggcctattcatccagcatgagctgtccatcaatcgcttcttcgtagcgcctgcctcagacgattttcctgacttcagggaaatcatctacgcccttgcgtccactgttctcgcatttttcaaacctcatgtatacaatataaatttgcacgattagatgagttcacttacaagggcacctcaatcctgcgggagctgacgaatgataccatagcctatttgctcagatgaaaacccatatgtgaaatcgcatgtgatttttaagttaacaaaccgattttgaataaaggttaccaattcatcttcggtgaagtctcctttcaaatcgttggtaatgatataagaatatgtaccgttttcatttggcttatttttcgctaaaatctcttctcgagttggctccagcaggtgaactttaatattgctaaaatcagcaaaaaatccagagcgggacacaaagaaaattgctccagtcataaagcgggaaagaaattcttcaccgaatttttcaagtatctgttgttcttcattgcgctctcgataggaaaaacagtttctgctgccgataactgtatcgaccggattgctggcactatcattgagtacgttgattatgggagatagcggttccccaaatttgacattttctattttcaagtgagactgtattaccctacagacaaacgccaggatagatgcttcaatcgtattctttagacgttcattttctttgcgagagagttcaaagcaaaactcgtagcagttaaccaagacggtaggattggatgtcacttctgcaggcttatcagaaaaacgacccgaaagaagcccgcaatagtccttcactacctgagtccacttagaaaggaaatcactatcgttcattagaaggtcgtgttcttgaatggcttcatggatggaatactgtttatacgtttctgacagagcagacctaaacaaattcactgaggtctcattaaagtcaaagccaaataggtcgcagaaatcatgatatttttgctttgttcgtgtagatgcagtgctatcggaaaagtattgactgtatagcttgaactcctttccaacggcaaaactttgcaaaatatcagataaaagctctattgaaggatcaaccgccatgaaagaaaaaatccagaaatcgtttgttacagaatcaaacttcaaggttttcacgcagtttggctttattacttcccaagatttcatcaggtcatacgatagtttgatgtcgtcgtttgaaacgtcaggaaatgcgcaagatgcgatgacttgatggaaacaggtccggtgatttcttataaaatcaccgcagaactgaatctgctctttgtctgccaaaggctcatattttgcgatgtaataaaaatataggacgataaaaagcttgtcgaccaaatctgtatcaggatgtatgtcagtaatactataaactttttcgcttagaatggtttcatttctattatcaaccaatgacttaaaaaagttgagacggtcatacctctcaagaagcgaaaaatctcgaaaaggagaaaaccaatcatacattccgatcacgaagctgtctttgattgcgacggcatttagcgggtaaatattttctacaacagcaagctgatatatctgagctgtaaatgaacggagatcctcagtgtcactataagcgggattacgaaatagtttaaacctaaggttatcaaggcctccgcgcttacgggcgtctgctaaatctaaatattttagcccgttataaaactcaaagcaaattgcacggaatatagggaattctttcttcttttcgttgaaactgcagtatgcattctgcaatgcatctgtcatacaaaaaaatagatcactatttttcgcgccaaagagtctatttgcgcatttgatatactcggaattaaaagctgtttgatccgtatcactgctaaccgacaatagcatttcattcatagctgagagttcttcttttaaatcgtctatgctggcagtgcttgcagatcttatgatatcgtctacaaccgttgaaaatttttcttgggtgggggcacttactaagtatgaccgaatttctgacttgtagagttggtaattggagagcagcgaaaaacagtccgtcatcaatatcaaagaattaaataatgttacaaaaaaggttaattccagaaggttgtaccattgatagcttgtgctgacaaaggcaattataatcatgaacatttgcagaatggcgacggagttataagtcagtaaaaccggtctcagacgcagtacatatttaaggactggaacgccgtatagggtatccttggacatacctgtaataagcgcaatgatagccaaaggtaaaacggctattgtcacctgtatctgtaggatcacaaatgaactgtcggtaagtggcagatctgtgagtagccatgatggtaatggcagatgaaatatttgccagataattactactataaaggctacccctacaaaaatacaataagcaatatcatatttcttttttatatttacaggcttcattttactctctccttgataggcgttaggcgaaaagcaacacccggataaccggtaggtcctctatttgctttttgaatcatcctgacggtcaactacctgcgccgatgcttcgatcatttctgtgaccgccgcgtttaactgaacggcattctgcgaagtaataacaggctgaccggtttccgcctcaagctgctgccgcgcaacatttgcaacattgccgccacgcttagcaacctttacgctctcatcaaaaccaacgggctttgatgccttggaaatatctcgtgtggaagcctccgccagcatggtcagcacgagttcagtatcgctcatgttatccctcagattctctttttttagtcccttgagatttttgtactgccgggttgtcataccggaccacgcccttgaaatctcatcggtcaggatcgcaaattccctgcctttttccactccgcgcttctgccattcgtcggtgagctcattgcggatacggatggaaaggagcctttggtgcacccagtcgggatcatagccctttttgagataggtttccaaagcacggtcaatggcctgttccgggtcaatggtttcctcaatgcgctcgcggccaacctcggcaagccagcgtttcactggctccgcgcggggagacggaacggactggatgatacgcaagagctgttccgtagtagcaacatcggttgcgcggcgctttccgtcagatgcggtcattttcaactgctgacaatttgtcagcagttcatctgcgccctcttctttcagccgctgcttgagtttggcccagtagttgctcgctccacgagcggtctgctgacctgtcaaaacagaaatgacatcggtaactgaaaaataccattcttctttttctgtatcccatgctgtgcggatcttttgatcttcaaaaagctggattttttcctgttcgctcatagcgttctgtatcctttctttttctctttttcattatacatcagccgacccgctgccgcaagaacgccaaaaacaactcttcaagttccttgtcgctgcccagcttttcaaggtacggagcgaacttcctgcggtcaaagctgatcttctttggaggtgcagtacggcgctgggcttcctcggcgcgagcctgccgccatacagcgtaaatctcctgttttcccacagaagggggcggacaggtgtgggtgattttctgcaccgtggccttattgagcgtgtagccctcgatagagcacatctccacaaatgcctgctgggtggatatgtcgtagtcagcaatcaactcagcgcaggcaatcggcagcttgcgtggagtgtcttccaaaatatctgcaagcggcccaatcaggcccgccagcttgattgctttgcggatctcgtactcggtcacaccaaagaaatccgccacgagtttacgggcattgtacctttggcgattctcgccaaaggtactgtccgtatcgccctcttgcaacttttggcgagaatcgccaaaagttgtttctgcttgatttgcatcccactgaccgtgccgattgttttcgcgcagcagcgcacgatatgccttgccacgctcaatgatggtaaggtcttgacgccgcaggaggttggtggcaacagcaatagagacagcccttgcgtcgtcggcactcaccacctcggctgggatcatgtcatgcccggacatctgccatgccttcgtgcggttgtgaccggcgaggatctcataatcgttgctgcccgagatagggcggacgataacacgctcgtagatcccctgctcggcaagctgctgtgaaaacgctttgagcttttctggcggatagggacggaacccgatgtcggcagtaaagaatgggcgaagcctttctatcggcagatcacagaatctcgatgcctccggtgctggcgcacctctaaacagcgtttcatacgcctcgtcgcccaccacaatttcagcagcctgctgtgtggcgctcatacgcttttttagcaggtcattcatgtcgcgtttaggcaagatgaagcacctccagggcaaggctgcggtatgactcggcagcaggattcttaggtgcataatcaagaatgctcattcctgcagcagggcactcggcgaccttgattgtctgctcgattgggcgctcaaaaacatgtagactctcaccgtagatatcatttacactgtttcgaacgctctgacagagctgagggcgcgattgatacatagtcaagagaatgcctgcaatcttcaaatcaggattaaatcggttctgaacatttttcaccatttccaatacatccggaattccttcacttgcaaggaaatgtgcctgcactggaataatgcaataatcggcagcggcgagtgcgttgatggtcaaaagctcgtgtttcagtccgcagtcaataataatgtagtcatactgttcgcggagagaaaccagcagcttctccattatcttctcacaaagggtatcggagaaaccggcggcattatattgcgaaagctgcatgacctgtaagcgggccgcagcgtccgcaagacgcttattggcgggaatcaggtcaataccggtttcggtatgtatcacggtgcgcggaaggtgcaggtctaaatcttctggcgagtcaatttgaacgagcaggagttttgccaaggtgtttttctgctccccaggcgtatagcccaatgcagcagtgaggttgccctgcgggtcgttgtcgatcagcaagactcttttcttcgctgccgcaagtgcagcaccaagatttaatgcggtggtagtcttcccaacaccaccttttgaatttgtaatagatattactgtgctttccctcataattttttctcctaatacttaaaagaagttgacactttaatgactcaaaatgctggttaaaaatattctcccaaggtcatacttccccagctttctattccacaatagcaaaccgctcttctaacactcttctaacaattttcttcagaaccagattttttcaaactctgatttttcaatcgccgacgcttccactatgcctgaaagccttgtaacacaagggattcagagggatgcagcgtgaacatacgtgatcaagcgtaatcgcgcttattagactacggaccagaaggccgggggttcgaatccctcacggcgtaccaaaagtcctcgaaatcgtctgatttcgaggacttttgcttttcataagttccgtttttagggtgttgcttttttctgacccaaacgctgaccccaacgggagcgggcagcggaaagcatcagacggcacgggtagcggaaaggactataccgcacgggagaggatgttccccatggtctgggcggctttgagttgggcgtcggtggtcacatgagcgtaggtgtccagcgtaaagcccgccgagtagtgacccagcatcgaggacaccgttttcacgtccacgccgttctggagcgccatcgtcgcgaaggtgtggcgcaagtcatggaaccggatgcggggcagccccgcgcgtttcagcactctttgcagcatatgcaggacgctgtccggtgacatggggcctccggtgggtgacgggaacacccattcgctatttccgatcttgcacttttgcatttttagtacgtctattgcgtctgccgacaacggcagggtgcggtaggcgttttttgttttcagcggggcttcgaccaccttgctgttctgccgtgagatggcccgttggattttcagtatgccacggtcgaggtcgacgtccgtccatttcagtcccagcagttcgccgcgcctaagtccggtggcgagatcgaggtagcagggcgtatcacccgccagcgcgtggcagagatcgtccaccagcagcccgccgcccgcggcgtccgtggggcagggatagtcccgcaggaagggaaagcccgcgcgggcaaaggcctcctgcgtgcttttccagaagatcgcaaggttggcggagtacacgctgatgcggatgatgtgcagcgcctccgccttggcgcgctcagcgagataccagttcactgccgtggtctttccgtagcccatgggcgcgaccacggtggtcatagcgcagcgggaaatgggccgcaggctctcctgcagccgctcggagatgtagatggtgttcaggttccactttgctttcggcatcatgcattcctcctgcctgcggcgtttttctgattataccatgcaaatccggccgtggaaagagcgatgtttccccggccggcgccgcgcttttttcattccgcagaaaaaaatctcccgccgggcatctgccgcggcgggggatttcagaagagagagatggtttctgattagaagggcccgaggttgatgacctgtgccagaagcacaaaggcgaagcccgcgaccagaagcatgcaccacagcttccaggagaagcggatccaatcgccgaagttcagcttgcccatagcgagcatggcgtggaggctgccgtaggtcggatacaggtcgttggtaaagccttctgcatactggtaggccagaaccagcacctgctggttgatgcccagcgccttgcccagcggggagaggatcgggatcagcacaacggccttggcctcgccggaaatgatgaagaagttcatgaccatgacgacgaagaagatcgcaaggagcgtcagcagcaggcccttgttctggagcagaccgctcaggtaatagacgatcgtatcgaggatcttgccctgacgcatcagagcggtgatcgcctgggcaaatcccatcatgaacaccacgctcagcaggtcagctgcgccggtggtgaagatacggcaggccttgctgggattgatgccgcacacaaggaccgtcacaatggtggagatgatgaacacggcggacatctggttgaaggaccactcgagctttacgcagccgtaggtctggacgatcagcgccacagcgaagatcagcaggccgagcttcattttcagcgtgagggggatctcctccatctcgacctgattctggcccacgcgctggttcatatattcctctgcgcagcagctcttggaggggtcggccttgatcttcttgcagtaaaaccagaaatacgtcacgccgatcaggaagaacaccaccgtggcgatcgtgcggtagcccaggccggagaagatgggcaggccgatcatctgctgggagaagccggtggtatagatattgacaataccggcggtccagccgatctcaaggccggcaacgacaactgcaaagccgagcatacggtcatagcccagacccatgaccagcgtaataacgattgggataaacggcatcatgttctcagccatgcccacaacgccgcagatcaggaacagcaggaaaaagcttgcaacgatcaggaattcttttccctttgaatgcgcaatgacccgatgcacgcccgcagtcagcgcatccgtgctgtccagaacggccagcgcgcccgtcatgaccaggatgagcgagccgatgcccatggcctttacgatacctgcgttgatcgccgtaaagaagccaaagaaggtaacagggtcatctctttccacaaaatggaagctggaagggtcgatttcctcaattccggactccggattttgcacgatgtcgtactcaccggcggggatgatccacgtcagcgccgccaccagcagcataacgcacagcaggatgatgtagccgtgcggcagttcaaaaggctttttcgccttgcgaagttcgttcttcataatacacacctcaatagttctgttttctgtttctgttttctctgttgcatagggttaagcctgatacacgcatcgacctcctactatggttttaaggatcttcaaattcgggatgtcgtctgcgtctacctgaagcggattgcggtctaagaccacaaagtccgcccacttccccggttcaatggttcccaccagatcttcctgcttgctctgatatgccgcattgatggtgcttgccagcagcgcctcatatacgctcaagcgctctgtctgtccgatcacagcgccgcttttcgctttgcgcgtcaccgccgtccagatggaggtcagcgggtccggcggcatgaccgggcagtcggtatgcaccgtcggatgcagtcccatgtccattgccgtcttgatcgggtccacatgctcgcagcgctcagggccaaggtaggtcgattcaaagatatctccgttggggtagagcgtcggcacatagaatgtgggcgtgacccccagctccttcattttttccagctggtccatgcggctcatctgcgcatgaacaacgacatggcgggggtccggacacggattttcaagctgcgcctgctcgtaagcatagagcacatcgtcgatcgccgcgtcgccattgcagtggatgtgcatctgcgcgcccgcattgtgcacctttttcaccagctccgtcagctcctcccggctccacacggggctgccgcagtaatccgcggaacggtctggcagctttgtgtagtagggcttcgtcagataggcggtgccgcagccgatcgagccgtcctgaaattcctttccgccggtcataaagaacatgtttccctcggacttcacattctcttttgcgtatttcgccgccggctccggcgcgctccacagcgtgcagcgaatgccgagatacccctgcttttcgccctcctgcatgatctccgcgtcgcccacaaggccctgattggccgtggtatagcctctggcggcatagtaatccgtggcttccttcagcccgcggatcttttcatctctcgtgccgagaaagcccagctcatccttgtaccagatgagatcgactgcggtctcttccagaacgccggtgggctctccctgctcgtcccggcggatcacgccgccctgcgggtcgggcgtgttccgatcgatccccgcgatgcgcagcgccatcgagttgacatacatgaaatgggacgtaacatgatcgcagatcacaggatgctccgtcgagacctgatccagatccacgcgcgtcaggtggcggtgctctgcaatgatattctggtcataccccgcgccgattacggacttccccttcggagttctttccgccttttcccgcaggatatccagaacatcctgaatccgctccaccggcccgtagggcgggcaattcacattgctgtagatcagtcgccccgtgccgacctcgacgaaatggctgtgggcgtcataaaagcccggaagcatcgtgctccccgccaaatccactcgctcggtgtccggccctgccagcttctctacatccgcccggcttccgcaggccagtatcacaccgtccttgaccgcgaccgcctcaagcgttgcatcgcagccggtcagcggcaaaatggttccgccgctataaatgatgtctgcatgctcttgtgccatatttccactccttacttacatctgatttccagaaattacagaaatttgtgatatgcttcttccgctcaccggcagcgcgccagaatattgcacagaagccggtaggccctgcggacggaggaaatgctcatctcctccgaaggggaatgaaagttccagcagtccgggccgatggagatggcgtccagctccggcttcttctctgaaaagaagccgacctccagccctgcatggaccgtgagatattgcgcatcgcagccgaacagctcgcgataggcttcgctcgcaatcgacctgagccgggactccggctggaaagaccaggaaggatagaaccgatccgtcgtgcattttccgcccagcatcttagccagccggcaaagccgctggtataggtaattgccgaggctggggcgggcggagcggatctcatagacgatccgcagcccctcttcggtgaggaaaagctcccccatattgtcggaggtatccacaagacccgtcagcgtttcgttcatctgatagatcccgtccggggacaaaagcgcggctgtgagcagcgcgtcaggcgcggcgcaccacgccggccgctcggcggaagcaagcgacactgtcagctgcgcgccggaggccgacagctccatggcaaacgcatctttaagctgctcgacggccgagcggagcttctcctgcgctccggcaggaaaacaaacgaccgcagacgcatcgcgcgggatcgcaaggcggaagctgccgcccgcgaccgggccaagctgaaaggggatgccctgctcttcaagcgcaaggaagaggcgaaccagcagggagatggcgtttccgtgcccccggtggatatcttcgccggaatggcctcccagaaggccggagaccgtcagcgtacaggcgatccagccctctggaaccgctccgctctccacgggcactttcagctccgccgcctgaccgccgcagcttccgcagaggaactcccggtcgcagcagtggtccagattgatcaggtacttgctgcgcatcgcagcggtatcaaaaccggcggcgccggagaaatcttcctcctcggcggtggtgaacaggacctccagcgcaggatgcggcaggctgtcgtcctccagaacggacagcgcgagcgccacgccgattccatcgtccgcgcccagtgttgtgcggccgttggtattgatccggtcgccttcgatctgccaccggatgggatcggtctcaaagtcgtgcgctgcgcccgacgctttttcacagaccatgtccatgtgcgcctgaagcatcacgccgggagcattttcgtactccgcggcggcgggctttctgatcagcacgttcctgtgcgcatcccgatgggcttcaagcccgcgctcgcaggcccagtcgaacagataccggctgatctgttcctcgcggaagctggggtgcggaatctgacacaaggtgtgaaaatggcggaataccggttcttgcaacagacgctcctgttctgcattcatagcaacgtctcctattcgtagtcgttcctgtcgtcatccggattatattgtaatcatgattatgttttctgtttggcgaaaagtcaactgttttttattttatattgccccattctgtaaaataaacaaaaaacgcggggaacctttgtgcagttccccacgttttttgtcgatatatttccccttggttcagcgtcccgccgccaataggtattcaaattccctgttgaactcttcctcgtgcgccgcgcggtcgtagccctgacgcttcaaagaggcttcatacaggaagttctggtgaagcgcaacgaccagatcggatgtgatctgcgctttatccgcccggagatccttctcctccaccatgcgctctatcatcgccttgtctcgctcggtcatgctcccctgcaccagcatattctgcatttccttgctcaggtgatccagctcgttgggaaagagcacatggtaatagagatccagaacggaggacagctggtcccgatactttccaaaaaagatatggtggtagatttcaggatcgtccagcgcgtgcttattgaagcagtggtaaacggtgcgatactgttcgatcgcccgcatatccggcttcagcttggcctccagctcggcaacatagtcccgcaggtagcacagcgaaccaaacatgatcagctgatccaggtcgttgaagtaattataaatcgttgcgctgttgtagcccgcctccgtcgcaattccgcgaatggtcaaattctcgattccatcccggcggagcagtttttccgttgcctcaatgaagtaaatcatgatccgctttcgcttcagcgtcaggtcataatccagtgctttgttttccaaatccatcggattacccgtcctttcatctgaaaatttcaaaaataaggttgacaggagaaatatatctcaatataatcacgattataatctaatcttgactatgattgatcgttttatcggaaaggatgatactatgaaaaagatcacactctccggcggcttccttgtctttctcggcgccgccttctggagccttaactctccactggtcaaatatctatcgctggaccccgttctcatctgcgcgctgcgctccgtcatcgctggcattgcgctggcggcgacgatccggccaaagcagctttcgtggaatggatggacgctggtttatgtcgtttcctacacaggcctttgcatgagcatcattctggctctgggcgcaacctcggctccggtagccatcgggatgcagtacacggcaaccatctggctcttccttgttggcctgctgcgcacccaccgcttccggttcaagagcttcctgccggtgctggtgatcttcatcggcgtggtattctttatgtgctccggctcggacgccgcaagccagaagggaaacctgattgccctgaccgaaggcgtgttcttcgccctgatgacgatcagctcaaaaaaagtggcggggaaaaaccccgttggtctcagcgccgtgggaaatctgtttgcaggcgcagccatctttctctttgtgccgggcaccgtgggcaagatgagcgtcatgaccgggctggactgggtcatcatgctggtgctgggcgtggtgcagaacggcgcgggctatgccttctataattacggcatccagaaggtctcggcgcaaaaggcctcggtcattgcgctgtgggagatgatcctcgggccggtctgggtggctctgttcttaaaggaatacccgcagccgacggttctgatcggatttgtaatcattctgctgggaatgctgatggacgcgctgctcaatagcgaagctgccccggccgaaggcgaagaaattgcgataaaaaactaactgtgattataatatcacaaaggcgtcaaaaaaggaatagtaattttcatccattttgggcagtctttctaaaagtccttgaaatcgtctgatttcgaggacttttgcttttcataagttgctattttcgggtgttgcttttttctgacccaaacgctgaccccaacgggagcgggtagcggaaaggtctataccgcacgggagaggatgttccccatcgtttgcgccgccttgagctgcgcgtcggtggtaacgtgggcgtaggtgtccagcgcaaaacccgccgagtagtggcccagcatggaggacaccgtttttacatccacgccgttttggagcgccatcgttgcgaaagtgtggcgcaggtcgtggaatcgtatccgtggcagccccgcccgtttcagcacccgctggagcatgtgcaacacgctgtccggtgacatggggcctcctgttggtgacgggaatacccactcactgttacccgtttttcttctttgttgcatcagaacgcttatcgcgtctgccgacagcggcagtgtgcggtaggcgtttttcgttttcagcggggcctcgaccactttgccgttttgccgcgagatggcccgttggattttcagcacaccacggtcgaagtcgatgtccgtccactttagccccagcagttcgccccgccgtaggcccgtggcgagatcgaggtagtagagctcgtacacgccgctgtccctggcctcccggaagaaggtgctgagttggtcggcggtcagcgtccgcatctccttgtgttcgacttttggcaaggcgcagccctgtgtgggatttttcgtgacgaggtgctgctcgatagcgaggttgtacgccgagccgatcatctggtggatgttgcggacggtctttggtgctaaaccttttggtttcttcttggcctcgatgcggtctactcgcccgccgtccaacagatgtttgtagaagcgttgtaagtccagagaagtgagatctgccaacgggatgccgccgatctgcggcttgatgtggtttttcagaaagccttgcgaggttttgaaggttgatgggcgcagtttgatttttgcgtagttttccatccaaacctccagccaacttcccaccgtgtaggttttggcccgcccatagtcgatgccgacgttttcctcgatggcttttttcagcttttccttgacttccgcctgtgtcttaccaaggacatttttgatgatggccttgccggtttccggatcgtgaccgactgtgtagcggccctcccatcgaccgtcctttcgtttgcggatattgccctcgccgtttgctcgtcttttcggcatggtatcagcccctttcgcaacgaacaataccgtaaccaagggaacaaagctacccgaaagtcgaactgttatcagaaagttatcatttgcccctcggcgccgcgccgccttatctttgactattgcggcgcaatttctgcgctgccgggggcgttctctttggttacagcggtgcgatttttgaacggctgagaaaccctttttattgactacagcggcgcaaaatatgcacgttttactccgaaaattgccgctgcgctgaaagcacttttttgagcggctgaaaacggcggttttgctgtttgactgcggaacggtcaccttggaaagtccgctgccacgggtatttgccgcgcctcacgttcacccaagactgcgaaaacgcctctcaaggtgcaccttagactgcggtttcaaaatctcggaaagccccgcactgcggggctttgtgggcgggccgcacgcatgagcgactgcggccctttatcttgttatattttcgaacggggatatcaccccacgaagcaccttcaaaaccggtatcaacgctctcaagagcgatgatataatatcctcatgcggacagagaatttcctgcttctatctttgtagccaagtctactgcgcacagactggaacctctgccctgtgggatgtcacttatgagccggatgtcgaagcgatggatcgctttcttctaatctcgcaacaggttgtgaccttcagcagcacgaggaatgtccgtaatttgaacatgagaggagcctgcactatgtacatcgttgggatcgacatcgccaagagaaagcacgaggcagcggtgattgacggcgagggcaccgtcatcatcaagccgttttccttcaccaacaactgctccgggtacaatcggctgctggccatgctcgccaaggccaagctgccacttgacgaggtttcctttgcaatggaggccaccggacactactggctcgctctttttaccagacttcagaaggagggcttccgtgttcaggtcatcaacccggtgcagaccaactccatccgcagtttctatatccgtcaggccaaaacagatccgagggacgccctgctcatcgcagaggtgattcgtttcggacacttctccgagtctaccctgcacccggaaaacatctatgagctgcgggaactgtgccgtggacggcacgccatcgtttccatgcaggcggatatcaaacgaaaggtcgttgccctgctggatcaggtctttcccgaatatgaaacagcttttaccaatctgtttggcgatacttccatggcaattttgcaagcctgccccacgccaaaggaattatccgagatgcctcttgaggagttctgtcatctcatcgaagtccccagccgcaagcgtttccgcacggagaaggcacaggaacttcaggcgctcgcgcgcaattccttcggcttcgccatggccggcggtgttttcagcacgatgatccggctctacgcaaagcaccttgatttcttgaaacagcaggtacgagaaatggaccgcaagatcgcggagatcatggaaactctggacacgccgattaccaccatcaccggcatcggcccgacccttggcgcgtacatcctcagcgagatcggagacatcagccgtttttcctccgcggcaaagcttgccgcctacgcggggatcgacccaaccatgcggcagtccggtgaatacaacggcgtcagaaaccgtatgtccaaacgagggtcaccgtatttgcggcacgccatttggctggcagcttcatcagcggtgcttcacgatccggcgctaaagctttattttcagaaaaaacgagatgaagggaagccctacatggcgtccgtgggccacgcctgcaggaagatggtctccatcatttacgccgttatgcgggacaacaagtcctatacgccttacatcccaaatgagatttcggcttgacaaattatagccggtctgtgctaaaatcgaacggccctccccgtccaaaaatccggcttaaaaagttcgacttttcccttaaaatcacttccacgaatagcaccaaaaagttgccgccacaacgctgtttcaaaccgtttctcatcgcgattttcaacttctctcacaaacggcccacgttcgctctcactcccgaaagcgggtacacactcgccttcgccaacaagatcgcacacaacggctcacacgccgaaacaggggccttccctccctcggccacagcagggctttgcgctgccagcgaaattccttttactccgccacgcttttatatacatacatttcccggttccctgtgaaccctcaacatcagcaacagctctatctcagaccatctttcatcgcgttttttaacttctctcacaaacgccccacgttcgcttttgcgggtaaaaacgggtacacactcggctttcggagaaggattgcacacaagggcttacaaggcgaaacaggggcgtttcggacagggggcgctatcactaccctcggaccgctccacacgtttcggaaaccctgcgcggccagggggtaaaacggcgtactttgccgctttgaggtcttgtccgggggcgctctcaaagaacgcagaaagccttcggaacagcgatgcgcttatgcgcgtcgctgttccgaggcgtcgcggccccgctgggctgcgcatacatatgccgtaaatacatcaattttcccagccgaattcttctcccatagccaaaaggcaggcaagaaaagccactctctgatgttccacatccatgtttttgactgcacagcatagctctttgatcgcatgagccgccttacaaacttcctgatcctgccagaagtcgtattgtgtcatttgcgtttgttgctccttaaaatacagcggatttatgtactcaggattaaacatcgtttcagtaaaatacatttcgtttcccctttcatttgattcaacaacattttagcactttttcatatacttgggccccatttcttctaaagagtaataatttttgcaaaaatttaatgtcaaactttgtaaaaacgttcttttacggacaaagtgataaatatttctggaaagcttatcccttttatagtatactaaagcacaagagaaaacataggaggttctcaccatgacggatgttcagcagcgggctgcggcaaaggaatttgcggcatactggaaaaatcgtggagatgaaaagcaggaaacacagcggttttggatcgacctgctgcggaacgtctacgacattcctaatccggaacaatccattgaatttgaggtacccgtcaaactaagccacaccagctttattgacggttatctggctgatacccgcgttctgattgagcagaaaggcgcggacattgatttgaaaaagggctataagcaatcggacggtcagatgttgacgccgtaccagcaagcccgccgttatgccggatacctcccgtttaataagacgccgcgctggatcgtgatctgtaatttccaaacctttgagatccacgatatgaacttccccaacggcgagccggaagtattgatgctggcagatttggagaaggattattcccgactgcaatttctggtggacaccggaagtaagaccatcaaaaaggaaatggaagtttccctgcaagccggtgaattggtgggtgtgctgtatgatgcgctgttgaagcagtacaaagaccccaccgccccggaaacgctgaaaagcctgaatgccctttgcgttcggctggtgttctgcctgtacgccgaggatgccgggattttcgggcggcgggatatgttccatgactacctgaaggatgttccggctgccgggattcgtaaggctttggcagaactgttcctggtgttggatcaaaagccagaggagcgggacaagtatttggcggacgataaccctgctctggcggcatttccctatgtaaacggcggtctgtttgccgacgagaatatcgagatcccgccctttaccgaagaattgaaaaatgttctgctctccaaggccagtgaggatttcgattggtctgccatcagccccaccattttcggcgctgtgtttgaaagcaccttgaacccagaaacccggcgcagcggtggtatgcactataccagcattgagaacatccacaaggtcattgacccgctgtttttggatggactgaaagctgagttggaagagatcaaggaaatcgcggtggagaaaacccgggtttccagactgaaagcctaccaaggcaagctggcggggttggcctttttagaccccgcttgcggctctggcaatttcctgaccgaaagctacatttctctgcggcggctggaaaacgatgcgctccgctgtcaaacgaaccaaatcacaatgggcgattatgcaaatccgatccaggttgccatccatcagttttacggcattgagatcaatgactttgccgccacggtcgccaaaaccgccctgtggattgcagaaagccagatgctgaaagaaacggaagatattatcgcccaccagatcgattttctcccgctgaaatcctacgccaatatcaccgagggcaacgctctgcggctgaactgggaggaggttgttcccaaggaaaaattgaactacatcatgggcaatccgccgtttgtaggtgcgcgattgatggatgcttctcagaaatcggatgtaaatctgatttttgagggctggaaaaatgtcgggaatctggattatgtttgctgctggtataagaaagctgccgatttgatgcggggtacaggaatccgcagcgcccttgtttcgaccaattctgtctcacagggggaaagcgtggcaaatctttggaaaccgctttttgaagcaggcgttcatattgattatgcttaccgcacgttccgctgggacagtgaggcaaaaattaaagcccatgtacactgtgttatcatcggatttagtattgcgccaaatcatgcagaaaaaattctgtacttcggtgaccgcgctcaaattgtccaaaatatcaacggctatttgctggacgcagatgatgtgtttgtggaaagcagaaataaacctctttgcaatgttccagagattggaatgggaaaccaacctatcgatgatggaaactatttatttacagaagacgcaaaggcagagttcttagtcaaagagccgacggcggaaaagtattttcacccttggtatggcgcacaggagcttattaaccgcagcccacggtggtgcttatggctgggagaatgttcaccaaatgaattgagaaaaatgccgtattgcatgaaacggattgaagcggtgcgcgaatttcgcttatccagcaagcgtgcctcaacgaacaaactggcggatattccgacaagatttcagactgaaaatatgcctcaaggacattttattgttattcctgaggtttcctctgaaaagagaaaatacattccgataggatacatggacgataccgcactttgtagcaacaaagtacgcataatgccggatgctacgttctatcactttgggattcttacttccaatgttcatatggcatggatgagagtcgtttgcggccgcttaaaaagcgattatgactactcaataaaaattgtctacaacaatttcccgtggcctgcgccgaccgatgagcagcggacaaaaatcgaacagaccgcgcaagccattttagacgctcgaaacctctacccggattgcagccttgccgacttgtatgatgaagctactatgcccccggaactgcggaaagcccaccagcagaacgacaaagccgtcatgcaggcttatggattctggggcaagctgaatacagagagcgcctgtgtcgcggagctgatgaagatgtaccaaaagctggcggagggctaatctacgatgggagaacttattcaatttttggatttgcacagtggttccttaaccgttctggttgccgcaatgtccatgataatcacactcgtatatgtagttgctactatttttatttgtagagccaatatccgttctgctgaagctacacgggaacaagttgcagaggcacgccgccaatatgaggaagaacatcgtccttatatatcctaccaattcatttttgagcatcgggctttttatgggatgcgatttatgaattatggcaggcgcgttgcaaatcacgttcaaattaaattagataaagattttgtaagtagcattcaaaaaagttccttctatgatggtttgagcaatcttcatactaaagaatttgcgctcggaatcgggcaaagttatgacatttatttcggagccagcgaattccgggataacccggacaaaaagccaataagaggcacagttttgtactgcgccccagaaacaggagcaaactatcaagaggcatttgaaattgactttgaaaaatatggaactattttctctgtcaacactcctgcggatgatttacatgaggatttgaaacggcaagaggctatactgaaaaagcttgtgaaagcagtagaaaatttgaaggaagaagctatcgacactgtagaagaaactcctacataattaacgagaacgcgcacattcaagatttccctggatgtgcgcgctccttttacgcggcaccgacatccccgccactcagttcatattgaaatgccgccttaaaataggttgatttttacctataatttgcatataataggtgctgcaaggaggtgttcccatgaccattgatacgaacacgatcgtttctgtgacagaggccaatcagaatttttcccgcgtgacgcgcatcgccgaaacgaatggacaggctgtgattttcaaaaataaccgtcccaaatatatgttggtcgatttggacaattcacctttgatcgacatgacagatgatgagaaggtcgactttgtggcggcaagaattttgaagaaatataagcctgcgttcatggagttggcaaaatgatcaaattctcaaaagagaaggtcttgctgcttcacaagctcatcgcggaggagacaggcgggagcattggcgtcagggatgaggctctgctggaatctgcgctggagaatgtcttttccggttttggcgggcaggaattttaccctaccaaggaggaaaagggcgctcgactgggctatgcgctcatctccaaccatgcctttgtggatggcaataagcgcatcggtatgtatgtgatgctgacctttttggaggtcaacggtattcggttggactgcacgaatgatgaagttgtcgaagtcggtcttgctgtcgcctccggcgcgatggactatgaggcgctgttggcgtgggtgcgggcacaccgtgtctgacccagttttgacccagaataggattggagtgggcagggctggacggaaacaacggaaaaatccgccgagcgaacggtggtaaaaagcacaaatcggagccgaaacagctccgatttgtgcttgagacaacctacggaccagaaggccggggggtcgaatccctcacggcgtaccaaaagtcctcgaaatcgtctgatttcgaggacttttgcttttcataagtttccattttttgatactgcttttttctgacccaaacgctgaccccaacgggagcgggtagcggaaagcatcagacggcacgagataggatgttccccatcgtctgggctgctttcagctgcgcgtcggtggtcacatgggcgtaagtgtccagcgtgaaacccgccgagtagtggcccagcatcgaggacaccgtttttacgtccacaccgttttgcagtgccatggtcgcgaaggtgtggcgcaggtcgtgaaagcgtatccgtggcagtcctgcccgtttcagcacccgctggagcatgtgcaggacgctgtccggtgacatggggcctccgcttggcgatgggaatacccactcgctgttgcccgtttttcttctttgttgcatcagaacgtctatcgcatccgccgacagcggcaatgtgcggtaggcgtttttcgttttcaatggtgcttcgactattttgccgttctgccgtgagatggcccgttggattttcagcacaccacggtcgaggtcaacgtctgcccatttcagtcccagcagttcaccccgccgtagcccggtggcgaggtcgaggtagtagagctcgtacacgccgctgtccctggcttcttgaaagaaggcgctgagttggtcggcggtcagggtcttcatttccttgtgttcgactttcggcagggcgcagccctgtgtcggattcttcgtgacgaggtgctgctcgatagcgaggttgtacgctgagccgatcatctggtggatgttccgtaccgttttgggagccagacctttcggctttttcttggcctcgatgcggtctacccggccaccgtccagcaggtgcttatagaaccgctgtaagtccagagaggtcaggtctgccagcgggatgctgccaatttgcggcttgatgcggtttttcagaaagccttgtgaggttttgaaggtggacggtctgagttttactctggcatagttttccatccagacctccagccaacttcccacggtgtaggtcttggcccgtccgtagtcgatgccgacgttttcctcgatggctttcttcagcttttccttgacttccgcttgcgtcttgccgaggacgtttttgatgatggccttgccagtttccggatcgtgaccgactgtgtaccggccctcccatcgaccatcctttcgtttgcggatgttgccctcgccgtttgctcgtcgctttggcataaaatcagcctcctttgccaacgaacaataccgtaatcaagggaacaaagctacccgaaagtcgaactgttatcaaaaagttatcatttgcacctcggagccgcgccgccttatctttgtctggtacaaaataagcatagcacccgaagcggatatgaagcctcggaggctatgcttatttttgttataatgggagggcaatggatggacggcttctttgatgagccaagcgctcgagctgtaaacagtcctccgccctcttgttataaagattcgattgagcaggttgctccggctatgccgtgtgcgcgtcacgaaccaaattgaatcgtaataagccggtgcggaatgaagccagggggagagatcgtgtacgctccgtttgaagttcagcacacgaggaaggggatgtcggagctcgtatcgctgctgcgcagcagcggtgaagaggttcgtgccgttttggaaagcaccggcagctaccattgcccggtggtgactgctttattggagaacggaatattcgtctccgtcgtcaattcgttgcggatgaagcggttttgctcacaaagtatccacaaggtgaagaccgatcgaatcgacgccatgcagatcgctttgtacggtctggcctattggcaggagcttcaaccgaccaagctgccggaggatacatatcgggagcttcagcttctggcgcggcagtattaccagatgacctcccttctgatcaaggcaaaggtcgattttaacgccatctgtgaccaggttttgcccggtatgcaggagctcatgagcgaccatgcagggcggcacaagctttcggactttgtcctgcggtatcgtcacaccactcacatcctcgaaatgggagaaacgcgctttcggaaggattattgcaaatgggcggaaaaaaagggataccgcaattgcgaacgtatggcagcactcatctttgccacagctcaaaacggtatccctgtgcttcccaatgcaccatccacgcagatcgtcattacggaagcgatacgagtcctccacacagtggaggcgtcccgtgacgctattttaacacagatgcaagctctcgccaagactctgccggaatattctctcgtgcgcgaaatgccctgcatcggggacacgctggctccgcgcctgattgcggagatcggagatgtccgacgctttcacagcaagcgggctctcatcgcatacgccggcatcgatgcgccgccgtaccagtccggcaaattctgcgcgaataaccggcatatctccaagcggggaaatcgctatctgcgtaagaccgggtacgaagtcatgcagagctatgtgatgcacaaaccggcaaacgacccgatctttacattcattgagaaaaaacgcggcgagggaaagagtggtaaactcgctatggtagcaggcctgaataagttcctccgagtctattatggcaaggtcacagagctctaccgcagcttgccggcaatagaatgagctgagatctccaatactttatttgaggcggccaagcgttccgttttgccgcctctgttttgctatactcttttcctgccgataacttttcttttaattagggcttgactttttagcaggtttacagcggcgcgttttttggaaccgctgtttgcgtcgatccatgcgaggaacttgtctttcggaacaacgatccggctgccgattttgagcgcggggaatccgttgccatgcgccagctcataggcaccggcacgggagatcccaagcacggcagcgacttctgcgacggagagcatcagcggcagctcgtcatagcttgtgtaggtggaatgcttcattttgttcttccttgtattatagagtcgtagttattaaagcccctctccaagggctgtgctacactgtaagagatgctgtggattggttacttcctcctaccgcaagacggttcaggaaaggctccaaccacaaccctttacagtattgttaatcagttagataccgccagacggntccttgtattatagagtcgtagttattaaagcccctctccaagggctgtgctacactgtaagagatgctgtggattggttacttcctcctaccgcaagacggttcaggaaaggctccaaccacaaccctttacagtattgttaatcagttagataccgccagacggtttatgtagaacaaggttacaagagtaaagcgtcctgtggacccagcatcaaacaaacacaccggaggtattcatcatgatttgcgtgggtattgacgttgccaaggacaagcacgactgcttcatcctcagctcggaaggtgaagctctgacagatgtattcaccatccaaaacaatgcggagggctttgacaggctcctgcaaaccattcgccgctgcacccgtccagaagataaaataaaagtagggcttgaggctaccggacactacagctacaacatcctcggatttctgcttgacaaaggcctacccacctacgtcatcaatccgctgcacaccaacctctaccgaaaaagtctgagtcttcggaaaaccaagaccgaccgtgtcgatgcgcgaaccattgcagctatgctcatgtctgatgtggacctcaagtcctacacagacacagcataccacaacgaggaactaaagtcactcacaagataccgttttgataaagttcgtgaacgggcgaagctgaagcagtctgttttccgcctggtcacgattctgttcccagaactggaaaagctggttccaacactgcacatggcatccgtttacgcacttctcagtgagtttcccggcgccaaacaggttgccgaagcgcacctgacgcatttgaaggcagtcttatacggcgcctccaaaggccgctacgggcgagatatggcaacaacgcttcgagacgctgccagatgttctgtcggctctgtcatgccagccaagtctctggaattgcagcatacgatccgcctgatccgcgaactggatgccgaaattgaagacattgagaccgcgatccagtccatgatggatgaaatacagtcccccattacaacgattccgggcattggtgttcgcatgggcgctatgattcttgccgaaataggagacttctcccgcttcgactcgccggataagatacttgcctatgctggcatgtcgccctctacttaccagtccgggcatctttctctgtctggagcctattcgcacatggaaaagcgaggctcccggtatctgcgctacgcactttacaacgccaccaaatatgtttgcctttggaacccggcctttgctgcttacctcgctaagaagcggggcgagggaaagcactacaatgttgcaatttctcatgcggcaaagaaattggtgcgtctaatttacgcgatggagaaatccaagcagtcatatcgtaacgctgcgtaaatccattcttctatatgctcagttaggcgtccatctggatgtctgctttgctatgccctttttgatccgtctaaaatttttaccactcctcacatttcagacttgacatttaatagttagtctttcctncaagcagtcatatcgtaacgctgcgtaaatccattcttctatatgctcagttaggcgtccatctggatgtctgctttgctatgccctttttgatccgtctaaaatttttaccactcctcacatttcagacttgacatttaatagttagtctttcctcatgcgctgggcaacaaattcaccgtggacagcttgcgctgaatttgccgccgctctgtcgcacgttcaaccgcagacagttggcgcgcgtgaaagatttctatggcttcacggatcggcctgatggtatagcgcaggttgccgttcttcttgatgccggaacgcatcaggacagaggtcggctcggtatagatgagtcctttctccgagagcgcgttgacatactgcatgaccgtattttttgtacggccaatagcttttccgatcgtggcgtagctgggccagcactggtaggtgctgcggttttcaaggcagcggaggtaagcgtagaccgcaatctcacttgcgtccagcccaagcgagaagatctcgttcggcattgtgaaatagtttttgttgggaaattgattcatggtgtgtcctcctgttcttcggggtggaagagttgaatgaactcctttgcagaatggacaacgcccaattccttgagctgctgatagcggatcaggtcgcagagggtgcgcagactgatctccgcgtactccagcagcttgtcggtcgccagcatttgttggtaggcgtccaatttagtcggtttgtccggcgattggaagaaggcgaacagttcttcttcggttggaatgctgtccggtgcgtcatgctgcatctcctggcggatgtagtcaatgacctcccgctcgacttgagaggtaagggggtgcagcagttgctgcttgctttgttcaaatggattcatagtcatgaacgctccttttgtgttcaggtgaggcggtaaggctgcggccaactcagccatactccgatagtggaacagatttgcctctacttataaggacactcagagcgcatttgtaaaccggaaaatagaaaatttttcaaaaaaactgggaagccctgtcatgagacagagcttcccagcttttcgtgtagcttttgcagccgctttgataccgccattctggagatgccatagatctgaccgatctcctccatcgtcagctcaccgctgtatcggagggagagcaggttttgaccttgcacgtccaattccgcaatggctccccgcagattttcaagccggaggttcctgagcaccgcatcctccacgggacgcttgacgcactccaaaccggacagcaccgtttcaaactcacttttactcaggtgccttgcgtcctgcttgtccgatgacggaaaggaagaatgtgtgcaggaaacccatcaggggtgtcctgcacctatgaaatcagctgttttcagaacgaaaggttctgaaaacttacacagcgagacgaaaatactttttcgtctcgctgtgtcctttccgctttcgacggaagggtacacacccgcgctgccggtacagcgccaaaaactgtcgaccttcatggaacttcctgcgtacagggtggtcataatgccctacggggtccatgaatggctgaggtcacacttacggtgtggacctcaccggaaagccgcgagatttggctttcgcctgttaccaatataaagtgaacgcgggggattgtcgagagtgggaaaatgcatggtaagatacaggcgtggacatctcttgacatgccatatttggttgcacctgcaccttttgggcattatctaagtgacattgagcttacacggatggggatgtcacgaccaaattattgcctgccagcccttttgaacggcgtttttgacaaaatataaaacaagaaaacgttatattttacaaaagtaacgtggtaaagtaaaaacatgttgacaagcgaaaaaccagataggataattagttcaaataaacctgtatacaacgtgactacagctggagtacgattcgacggcgaaaaacaagctgaacgattaaagcaaggggagtgataaatgtgccgatcctgctggaagaggacctgcgtcgtccgctgccgaagatgtaccgtgtgcgtcaacagttcgatgagacctgcctgaccgatatagagggcaccgtgcgccgcgagctggcaaagtcggagatctgtgcgctggtcaagccgggtatgcgtgtggcagtcggcgtcggaagccgcggcatccagaatctgtcctgcattgtggaaacgacggtgaagggcctgaaggagcttggggcaaagccctttatcgtctccgctatgggtagtcacggcggcggtacggaggagggacagcgtgaggtgcttgccggatatggtgtgaccgaggagcgtctgggcgttccggtcgtgacgacggtggacaccgtgcatctcggcgactgcgcgaacggccgtcccgtgtggtttgatcgtgccgcgtatgaggcggacctgatcgtacccatcaatcgcgtgaagctgcataccgactttgtcggccccattcagagcggcctttgcaagatgctcgttatcggccttggcaaccacaagggctgctcggccgtgcatgaggaagcgccggaggtatttgccgacgtgatcgaggaaacggcacggctgattttgaaaaaagcgccgatcggcttcggcatcgcaattctggaaaatgcttacgacaagacctatgccgtcgaagcggtccctgccgaggggctgatcgagcgggaaaaggagcttgtgcagatcgcacggggcaatatgccctatatcatgctcgacgaagcggacgtcatcgtttgtgacgagatcggcaaggacatttccggcgctggctttgatcctaacattctcggccgaagctccgtgctgaagaagttcgtactgcatatcccgaagtatcagcgcctcgtgctgctggacgtaacgccggcaagccacggtaacggcatcggtgtgggcttgttcgatgttatcacaaggaaggtcgccgaccagctggacctggaggcgatgtacgccaacgcgatcgcctgcaactgcctgatcgacgcatcggtcccctgcacggtggacgatgcggaaacggcggtccgcgtggcgctcaaatgctgccgcaatatcgaccgagacgatccgaagatcatccgcatcaaaaacacgctccaccttggggaaatcgaggtttccgaggcgctgctcggcgaggtggcgaaggacccgcgcatgtctcttattcagaaatgaccgtccaataaaaaacaggagggaaatacatgattctcaacgatgaacagaaagccatgctggagggcaaatatggcgagggcgcagcctatgccatgaagatccaggtcggcatcggcgagtgctttgacgcacagcgcatggtgccgatcaagcgggcgcatgtggccctgagcaatcaggacggcgacctctggtttgccgagaagctggtcaaggccggcgcgcgctgccgcgtggcgcctacgctcaacccgggcttctgcaccggccactttaccggcgcctgtgcccaccccgcggatgcggaggacattgctcacatgatccgcacggacaatgcctaccgtgcgctcggcgcggtgctcagctacaactgcaccccctacatcgctaccaatgtgccgaacttcggcgaggtctgtgcattctctgaatccagtgccacgccgtatgtcaacgccgtatggggtgcgcgctccaaccgcgagagcgccaacagcgcgctgtgcgcggccatcacgggctgcgttcccgaatacggcctgctgctcgatgagaaccgcaagggcaacgtcctcgttcgcgtcgaggccaacatgaagagcgcctatgagtaccatctgctcggcatgatgggcgacaagatcggcgagggcatccccgtgttcacgggcctgccgaaagtcatcaccccggaagcactgcgcaacctcggcgcacagctcaatacctccggcgcctacggcatgtaccacatcgtcggctttacgcccgaggcgcccacgctggaggctgctttcggcggcaagaagccggagcgcgaggtcgttatcaccgatcaggacctcaaggacttcgaggagaagttctgcgacgagacgcgtgacggcaaggtggactttgccatgttcggctgcccgcactttacgctggaggaggccaagtacatcgccgaacatattgaaggcaagaagctcgctatccccatgtatatcctcgtctccagccacgcgctgcagatggcggagcgcatgggcgtgaacgacattctgaccgccgcgggcgcggagctgatctccgactcctgccccgaccaaccctgctggcactatctcaaaggcaaggtcggcatcaccgagtcccccaagtgtgcgtactatccccgccgccgcgggatcaactttgtcatccgtgacctcgatacctgcatcgaggccgctctgaccggagaggtgaagtaatatgggaaagaaatttgcatgtcataagatttcggagggcgaggcgcaggctgaagccatcatctccaaggatcgcatcatgttctatcaggtccgtcccgaggacggcatgatggaggaaaagaaccactaccttgagggccgcattattgccaagaaggtcctgctcttcccaggcggcaagggcagctccgtcgttcagcaggacggcctgtaccatctcgaccgcttccacaacatgcccgctgctctgatcgtgcaggaccccgatcccgtgctggtcgccggtgcgatcattatggagatccccatggtcgaccgcctgccggaggagttttacgagaccgtaaaggacggcgacacgctgctcgtcaatgccgacgagggctttgtcgagatcgtgtgaggggaagacgaaaagtgtgccccaccgggcgtatcccggaagaaataaacagcaagaagcgatgaaaacaggaggaattgaaatgaaaaaggcgttatctctgatccttgcactcgccatgatcctggccctgactgcctgcggcagcaagactgacgcccccagcggcaatggcgatacccagacggatacccccgctgagaagatcgttctcaagatcggccacgttgaggccgaggaccgttccacccataaggctctgctgatcttcaaggacgagatcgagtccaagaccgatgggcgcattgaagtccagatcttccccaatgctgagctgggcggcgacgaagagctgtgcgaatctgtcgcaatgggtaccattcagatggctctgccctccacttccgttctgacggcttacaatgagcgcatcggcgttctggatatgccctacctgttcaccgacgcgcagagtgcgtttgacgcacttgacggcaagctcggcgagcagatcgacgagtggatcgccggcaacggcttcatcagcctcggctatgtttacaacggcccccgctgcaccaccaactccgtccgtcccatctacactcccgatgatctcgccggcctgaagatccgcgtgatgaactcccccgtctttatccgcatgtacgaggtcctcggcgcgaacgccactccgatgagcttctctgagctgttcaccggcctgcagcagcacacggtcgacggccaggagaatccccccacgctgatctacgcctccggcttccagcaggtccagaagtatctgaccatcgataaccacgtccataacttcctgcccattctgaccaacgagaactgggtcaacagcctcagcgccgacgatcaggccattctcaaggagtgctgcgccaacatggtcgccaaccagcgcaacatcgagcttgaggacaacacggatatcgtcgccaagctgcaggaggccggcatggaggtcaactacctcaccgacgagcagtatcagtccttcgtcgataaggtccagcccatgtacgacgagtacaaggcggcatggggcactgagatctttgatcttgccacttccttcaacaagtaattctacgcaatcggttttgttccctaacggatatggcgggccgttcccgtgcgcggcgacggcccgcccaccgtattttctcgagaggagttgagctcatctatgaaaaagaccggctttttcggaaagctgatctacggctacgacaagctggaggaatacctcctctgcggaagcctcgtctgtacgacgctgatcgtgttcgcacaggtcatcatgcgtaaggccttcaatgactccctggcatggagcgaggagctgacgcgctacatctttatctggcagatctggctgggtgtcagcatcgcgcagcgggacaagcagcacatcaaggtggagctgctgaagtctctggtcaaaaatgagaaggtcatctcggtcgtggacatctttgccacgctgatcctgatcgccttcaatgtatttcttgttaccaacggcagcgagctggtcaatcagatgtatacccgcggcaatgtgtccggcgcgatgcgcctgccgatgtggatcgtctacagcgttctgcccatctcgtcctttatcctcagcctgcgcctgatcggtcaggtcgtggaggatattaagaaagcggccggcaaggaggtagagtaaatggaatcgatcgtattgtttgccagcttctttattctgctgatcatgatggtgccgatcggctacgccatcggtatcgccaccctgatcgccattcttgtctgcggcgacggcagcattccgctgctgatgatctcgcagaaggccatcaccggctgcgactcgttccccctgatggcggtcccgttctttatgctcgcaggtaatctgatgagcggcggcggcatcgccaagcgtattctgaatttctttgatacctttatgggctttatcacgggcggcctgagcatggtcaccacgatcacctgtatgttctttgcggcaatctccggctcggccatcgccaccacctctgcggtcggctcgttcatgatccccgcgatgaaggataagggctatcacgagggctacagtgcggccatctgcgccgccgccggcacgatcggcgttatcattccccccagcgttccctttgttatttacggcgttgccactggcacgtcgatcaccgatcttttcaaagcgggcgtggtccccggcattgccatgggcgttgcgctgatgatcgcctgctacattcttagcaagaagtacggcttcaagggcgagagaaagaagttcagctttaaggccatctgggtcagctttgttgatgcgatctgggcgctgctctctccggtcatcattcttggcggcatctacagcggctggttcactcctacggaggctgccgtcatcagcgtggtgtattcctacatcgtcggccgctttgtgtataaggagttggacgcgaaggcggcctataaggcgctgcgtgataccgtcattgtcaacggcgcgaccacattcatggtcggcctgtcctctgcgttcgcggcttacctcagtctgacgggcattccccgtacgctggcggctgccatgctcggcattaccgacaacaagatcctgctcttcgtactcatcaacctgttcctgctcattgtcggctgcttggtggataacattccagcgaccatcattctcgcgcctatcctgctgcccgtcgtgacggcgctgggcatgagtccggtcacctttggcatcatgctgacgatgaacctcgccatcggcttctgcacgccgccctatggcatcgacttgtttgtggcttccgccatctccggcgtttccatcggaaagatgatgaagtacatgatctggttcctgttcgcgctgctggtcgtgctgatgctcgtgacctattggcccgcgttcacgctgtttgcattcgcctgatcgacacagcgcggctccgcggaattttttacattgcaatctgcgcagcggttgtgtataatgaacaaaaactgcggcggagggccgatgctccggtatgcggggatctaccgcataccggagccttttgcccgcgttctcccgagaaaactgtgaaatggaaagtaatatcatgttggaagcaaagcataaggtcaatctgtcggaaaaagcatacgatgagatcaaggatgcgatctgcaagggaaaggtcatgcccggagacattctgagcgagagtcagctggcgtcccagcttggcatgagccggacacctgtgcgtgaggcgctgcgtatgttggcgacagagaatttcgttgaggtcaaaaacgggatcggcgcctatgttaagcccctctcctcaaaggatatggaggacctgtacgaggtgcgctgcttgctggaagtgcaggcaatcaaaacgtcgatctatcgtattaccaacgacgagattgatgcttttgagagacattttcaggcattgcttgatgcctgtgagcgcggcgaacacccggggcagggggaattttccgagttggactggagtcttcatattttgtttgtggagcggtgctccaacaagtacattaagagcattgttgccagctacgattcaaacctgcgccgctaccagtctatgtccattgatgcgctcaacgatgtgcgtgagagtgcgcggcagcatctggagatactgaaggcgctgcgcctgcgcgatgcggataaggcatctgaggtgttgaaaaagcatctggaatggtctactgatctgctgcggatatctacttaaacgaaggactgcatttttggaacgagaagcgtgctggcgaagacttcaatttgtgcattattatgaggatacgaactggacagtcatctgtgcgatcatatttgatgttttgccttcgtttcttgatgagatgaagaagctttgacccacaccgtgacccacacgggaaaatgagcgaacggaagcaatggaacaaacaggctgcgacctcatcctttttggacaaaaaaccgctggaaagccttatactgcaagggctggaaggctctacgacgcttggtaaggatgaggtcggcagttcgaatctgcccagcagctccaacattaaccacttaaatcgtttgatttgagcggcttttgctttatatttgcgatttttaaagagaaaaggattgtgttcggtttttgaactctttagaaaacccatacaaaaacccgtaccgacagaaaaaagctgctcaaaagggcggcttttcatcttagtatagcggattatttgcgttcggtattcagttcttttccgaaaagctcgcgttcgcgctcgacggttatagtcgtgccaatgcttttacaaaggaggatagtccggagccaatgcacccgcaaagccccacgcgctatctcaaaaaattgtccgaccattgcgggctgcctgatcttcgcccgcacaagctgcgtcacacctttgcaagcgttgcgattaccaacggcgcggatgtggccaacgtatccgaagcgctcggccatagcgacaaggccgtaacactgcggatgtatcagagacgagagctgattgtcggtcagacggcggaaacaggggtgcttccgcatgtagagagcctcaccgcagcgcttgagccacacgcgggtaagcaaaattttggcgagttcgacatgcgacactccgccgccagcgaagcgacgctcgtagcggtggaaggttccgtctctgcttccctgattgtgctgtccttgatacggcatcagcgggctaccatagggaaggagaatggggcgcttggcaagcccgaactcttccttatattgtgcacgcaggtcgtcagcggctatcacgaccgctgcctcttgtgctgacgcgaaaaaggtcatggtaggcttgccgcctgttttgtctgcctctgcgcgtgcgcgttgctctgctgcgttttcgatgcttgctgctgctgcgatggtctgggcatcattaccttcgacataaaaaatagccatttcattctcctcctcggaattttgatgggaggattatgccacgtgctgggggactttcctattgacagaggcagcgacaaaattttattgaatgagggtttccgatggagaaaaagatgctcgccgcaagcggagagcggagggagatcttcgtccgctgcttcgaaaacggcgaaatgaattttttgactatgcccacgccggagatccaaagttgatgatagaactatttcctgaaatggggctcacagaggattcagattatttcaagaagattccaccatctacgttcgacgacaagaatattatcgagcagtatggcaaaaagctcagagaactgcgcactgaaaggggctgttccttacagcgagttgctgactacattggtgtggactttcaagctatttctcaagttgaaaaaggtgtccgtaagaaaatcagccgtaaccgtctcttgctgttgtgtgctttctttcggtgttcaccggaggttgtgctcggcttagagcccaacacaaccagagtagaactatttttgattgtcagtcccgagatcgagcattttacgttgtggatcacctcgtgtcattagactatccacgtgagacggatgtcgctttgcttatgcagttttttcggctgtctgagggagcgcgaagagttcagcaaaaggcggttagagttttcaaaaatgctccaagcttcaggattttgtcacatactgatgcaaccaaagaagcaacggaggcattttctgaaacagcatctattcccaccgacaatatggttcgtatcaacaaagcatacggttatgcggttcttgaggatctggataaaatcttccctgatttgcttgatgtcttcatctcaatcactgcaagcgattgtaagacgcgtcatatagctttacttctgctccaagtagcgggattctgtgacaatgagaatgctttttccaatgaaattccgcgctgttagcgcctttggttaacatgcacaaaaaattttattgaaatatttttttgaggggggaggtaatttctccaaatccatcctcaaaagagcctacgcacttcgcaggtcgtcccacctcccgttccacgttctgcgttccaccctcaaaacccttattttcttgatagaaaaaagaacgtagatcatgatctgcgtgacggcggcgctgaatatggacatccgacccggacgttcgagtgcagagtgcgcgctgcgccgctttccctgcgggccgcgcagaagctcgtaaaggcggaatgatctgctctttacagggctgcggagcacgcttacaggctgaaaagcaaaaatagagagttctgtcacaggacaaaactctctattttttgttattccctctcggagagcaaagccatcaggtttgtgcggcccacagcctgcaccgacagggcgcggccgatgagacagccagtgaggcacagtagcgcctgctctaagaagaacgaggcgcccctctgcttctgcgaggcgcacaggccccacatgacggtaaattccatccgcttgaccatgagccgcgagatgagaaagcccatcagacctaccatcaggaacaaggcagggaagagaatgcggctgaacgtaatgtagcgcctgagcgcgctcacggtctcggtaaagcactgatccagcaggagcagtgcggtcttgctgctgtcggaacggcccaccacgcgcggagcagtcccatgtcaaaacggtggctgatgtccttcagggcgtccaccttctggtattacgtctgatagtaggttacattccgaagcgcaagcgtactcatagccatctctcctcacatgccgcagcacgatatggggcgcattgcggcgacactctctcatttcacggttttggcaaaaatatccactatctacattatgcaggaggacagaggcaggcgaaggtgctggtacggcggccaagtttccgccgcgccaggggtactggaagcatagcgcgtcagaatcgataaaagggaggggatgaccgatggccatcccctccccggcgcttccgcgcctgtgaaaataatagagatgaggcttaatgatatttttccggatgatagccgaggtcctgactgtacacatcgatcctgcggttggccagacggctgtttgtcgggtggaagtacttcctgcggctgtcagccaggtcaatgtcagcatatacgatagcttcctcttcatcgcttgctggaccggcaagcggtgcaccccactggttggcgaccatgctttgcccagcgaagcgcgtgccgttgcattcacctaccgcatcgcagcaagcgacaaaaacatggttggacagcgcatttgccatacataaaacacctgccatcgttgcgtaagggtccggaagccgacggctttccttgacgtggtatgcgttgaacatcgtgcagataatatctgcgccctgaagtgcacagatgcggaagcactccggataataggcatccagacaaatcagcagcgcgatccggccgataggagtatggaagacagggattccaaggtttcccggctcggcccagtagacctcgtcttcgcacgggtggagtttgcggaacttgccgaccagaccatccggccctgccaagaccgcggtattatagaggtccgctccatcccgttcaacaaaggaaccggtgatataaacaccatgctcgcgtgcttttttcaaaagaaactgcgaagtccttccgtcggggattgcttcggctacggcgtatgcctctgcacgggtatcaaaggcagagccggttgtaaaaaacagctcgaaaccgacagcacggcgcagatcgacgtgtctaagctggaagcggaaaaggtgacgctgcccgtcagcgccgtgaacgacgtccttgacttggaagcggagacgctgtcgatcaagatggcggacgcggcgatcacgctggacaagacggcgaacggcgctgacattcagctgcatgtcagcaccggtgacgcactgagcaacgatcaggccgcaatcatcggcacgactgagcagtgtgtggtgctgaatgtgagcctgacggcaaacggaacggaaattcacagctttaacggcaaggtgaccgtttccgttccgtttacgtggacgcaacagggggcgctgcaggcttggtatcttgccgatgacggcacaaaggagccggtcgaggtggcctaccgcgacggaaacgccgtgctgacgcttaagcacttctcaacctatgccatcgtggtgaaggcgaacgaccctgacagcggcatcgtgagcatgggcgagaacgcggtcacagtccaaaagcagacggacgcggtttactacgctgcggcgctctacgccgaggacggcagattcctggcctatgccgcgagcgaagctgcggaggatgaagaaaccgtgacgctcaagtgggcgaacgccgactggtcgaaggcggcgaaggtcaaggtgttcttccttgacgcggaccgcaagcccgtcgccgaagcggtgacggcgctgatcaatggcaaaagccagaaaaactgagcggctacagcacaagaatgaaaaagggagcgcatcggggcaaggcccgatgcgctcccttttagcgcgtttcttactttttcagaaaatacatgttgatctcggcgcgggcgatcagcgcgccggtgtcgtcggtgatattgacctcgaaaaagccgatgtgaccgccgaccctgaccggtcgaccgacggcggtgagcgctttggactgcaccgtcgagcgcagatagttgatcgagccgttcagcgtgacgttgtgctggccgtagttgatgcgcgcgaacgcgcccgcggcggtgtcagccatcgcgtagagaaagccgccgtgcacgccgccccagatgttggaattttccggcgtgacgtcggcggtcagcacgcttttttcctcgtcgaccgaagcgacgcggatgccgttgtgacggataaagccgctgtgctcactcgaaagcatttcctgataattttcgaccatggcgcttttgcctccttttggcgcggaatgttatactgaaccaagcatagcagaatcgcgccggaggcgcaacagaaaaatgcgccgcgccgcgaaacggcaagatttgaggtcgctttccgcttcggaacgatttacaagcggcgaaaattctgctacattaaaagcgattcgaaccaagggagaattcttatgaacgactatcaggctaaatttgttacgccggagcaggctgtcaaggctgtgcagtccggcgactgggtggactacggattcggtgcgggttttcccgaactgctcgaccgcgcgctcgctgcgcgtaagggagaagtgaaggacgtcaaggtccgcggcggtcttgtgatccgcccgcgcatcgaggtcgtcgaagcagaccccgagcaggagagcttcagctattacagctggcacatcggcgattatgagcgcaagctccagaaaaacggccttgtgaaattcatgcccgtcatgctgcgctcgctgccgtacctctatcgcgacaagcacatccgctgcgatgtggcgtttgttcccgtctccaagcccgacgagaacggctactgcggcctcggcatttcgaactatgcctggcgcacgatctttgagagcgcccgcaccgtgatcttcgagatcaacgagcactatcccaagctccagggcgtggacggctcgcaccgtgtgcacctgtccgaagcggactacatcgtcgagagcgagcatgagccgctgcccgtgcgctcctaccgcgcgcccagcgagactgatatcgccatcgccaagatcgtggtgaatgagatccccgacggcgcggtgctgtcactcggcgtgggcggcgtgccctacacggtcgccaagatgcttgccgagtccgacaagaaggacctcggctgccacaccggcaccatttccgatgcgttccttgagctctaccaggcgggcaagctgacgaatgcgcgcaaggagcttgacaccggcctttccgcgtggaacctcgcgatgggctctcaggaactctacgactggctcgacgccgaaccgcagcttttccacccgggagacctcgactacatccactccgtcgagcgcatctcgaagctcagcagcgtcatcagcatcaacggcggcgtgcagctcgacctcatggggcaagaaaatgccgagagcaccggcacgcgccagctctccggcgtcggcggccagatggatttcctcgagggggcgtaccgctccaagggcggcaagggcttcatctgcatcaactcttcgcgccttacgaaggatggcgagcgcaagagcaatatccttgccaccatccccggcggcagcacgatctccgcgccgcgcacgatgatccagtatgtcgcgaccgagtacggcatcgcgagcctttccggcaagaccctgcgcgagcgcgccgaggcgatggccgccatcgcgcaccccgacttccgcgaggagctgatgaagtacgcgcgagaaaactttaagtaacttttttgatgaaagcagcaccggcgctgcttttatcatttaatgccactttatcatgttaacgaaatgaaagggccgcgggcctgcaattctatcgacattaccgattgcattctgtcggaatctgccatatactgcaataaaattcagcatttctacgcgccgcttgaaaaattgggctgccgcggcgatctgcaaggaggagtcacccatgaagcgaaactttattgccaagcgcttccagagcgcgggcaccggcctgacgctcgacaccgcggcgctggccaaatacaaggacattgtcgacctgagcatcggcgacacggactttacgaccgacgaggccatcatcaacgcggccttccgcgacgccaaagcgggctacacccattacggcgaccccaagggcgaccccgagctcatttccgcggtctgcaaggcgtgggaagaggacttcgaccagagccttccgcgcgaccacgtgctcgtgagcgcgtcgagctgcctcggcatgtcgctggcaatgtttgcaatccttgacccgggcgacgaggtcattgttttctccccgtatttcgcgctgtaccgcgcgcagatcgagctggcgggcggcgtgtgcatcgatgtgccgacctacgccgaggaggactatgccatcagcgaagagcgcctgcgcgctgccataacgccgcgcacgaaggctattatcttcaataaccccacgaaccccaccggcatgggctacgatttgtccaccatggagatgcttgcccgcgtggcgaaggaatatgatcttctcatcgcggcagacgagatttatacgacctacatctacgaaggcgatttccgccccatccgcacgctgcccggcatggccgagcgcaccatcacgctcaacagcttttcgaagaacttcctcatgaccggctggcgcgtgggcgtcatcatcgctgagccggagctgctcgaggtgatgcacggcatcaacggctcgctcgtctactccgcgccgtccatctcccagcgcgcgggcatccaggcgctcgcaatgcgcaaagaaattcgcgagaagtacgtgaccgcgtaccgcgaccgcattttctactccgccgaccgcatcgaaaagatcccgtatctgagcctcgtgcgcccgaagggcacgttctacctcttccccggcgtggagaagacgggcctcgacgacaagcagttctgcaaggagttacttgagcgcgcgcacgtgctcgtcagcgcgggcagcccgttcgccaagaccggcgcaaaccacttccgcatcgcctgcaccgtcggcattgaccagctcaagcaggcgttcgaccgcatggagaagctggaattctgagaattccgcttgtgtccgtaagacgggcatggtaaaatcaaaagataacgaaaaagctgccgtttttcggcagcttttttcaaaaggaggggcgcttatgcaggaaaagtcgaaacctgtggataacctgcgcgcggacgcggagaagatcatcacgcgcgccatcgcggcggtgctgccggacgcggcggtcgagcgcgcgctgaaagggaagacctttttaggaagggtgtacctcgtcgcggcggggaaggccgcgtggcagatggcgcacgccgcacgcgcgtgtttgcaggataatttttgcggcggtgtggtcgtgacgaagtacggtcacgtgaacggtgagatcgcggatgtcgcgtgctttgagggcgggcatcccgtgccggacgaaaactccctgcgcggcacggacgccgcgctcgcgctgacggaagatttgaccgagagcgacacggtcgtctttctgctctcgggcggcggcagcgcgctttttgaaaagccgctgcttccgcttgcggaattgcaggacgtcacgaatcagctccttgccgcgggcgcggacatcgtggagatcaacacgatccgcaagcggctttccgccgtcaagggcggacgcttcgcccggcactgcgcgccggcgcaggtcttcgctgtcgtgctgagcgatattctgggcgacccgctcgacatgatcgcctcgggccccgcgtatcccgacagctcaagctgtgcgcaggcgctcgatattgcgaaaaggtacggcctgcacctgtcggaacgggcgtgggcgcttctggcgcaggaaacaccgaaaacgcttacaaatgtcgaaacacagatcaccggcagcgtgcgcgagctctgcgcggcggccgccgcggcgtgcgaagcgctcggctacgagccgatgatcctcaccgattgcctctgctgcgaggcgcgcgaggcgggcagcatgcttgcttccattgcgcgcacgcatgcgcgtgacgggaaaaaccttgcgttcctcatgggcggcgaaacggtcgtccacctgaggggaaagggcctcggcgggcgcaatcaggagatcgcgctctccgcagcgctcggcattgagggactttcgaacgcgctcgtcttctccgtcggctccgacgggacggacggaccgaccgatgccgcgggcggcatcgccgacggcgagaccgcgcagctgatgcgccaaaagggtgttgacgctgtgcagtcgctcaatgataacgacgcctaccatgcgctcggcgcagtcggcggacttctcaaaaccggtgcgacgggcacgaacgtcaatgacgtcaccgtcctgctgctgcgcacggcggaatgaggggaaaatgcggagcgcttgacaacgggtcgttccggcgttacgatagctgcggcaagccttcccgggctgccggaatttttaaaatgaaggagccgttttttgaagtctaaaacgatgtcactggagcgtgtgcgctgaccgggagggccggcaaatttatgacacacgccgttcctcccgagagccatgcttttcaggaggacaacatgaaccgcgaaaacaaacgcaaaatctttgaaaaagggtactacaagacccacgcctgccgcgacaccttcacctgcaaggtctgtgggcggctctgcacgccggaaaacgccggcagcgaccatcgcaaccactgcccgaactgcttatcgagcctgcacgtggacattgagccgggcgaccgcgaaagcgactgcggcggcatcatggagcccgtggccgtctgggtgcgaagaggcggcgagtgggcgatcatccaccgctgcaagcgctgcggagcgctcagctccaaccgcgtggcggcggacgacaacccgatgaagcttatgagtatcgccatgcggccgctcggcgcgccgccgttccccctcgagcgcatcgaggagatgaccgccctcatgggcggggagggaagcgtgcgataagcccaaaaggaaacagaggaggcggcctgcatcggcaggccgcctcctctgccgcttgacaaggacggagcggggagcaggacagcggtgagagcaggtgtttcgtttgtgtttcggttttgcacaggtgattgcaaaaccggcaaacctatggtacaataaaactacagaccgatcaaaagccgccttggcgtcgaagatacagccgtttttgcggctgcttttcttatatttggccgcttttggccgcagacggcgttttcagatcacaccaaatgctggaaggagattttttctatggaggtgagtcacttcttcaggacatgaccgcacgcgttttgcagcgccggaaacggacggtgacgcttatggcgcgccccgtctatgatgcggcggcagccctccgcgcagggagctttgggatcggtcagatcaacgcataataaaatattataatttaaggatgtgttattttgttactctcaggcaaaggtctgaaacatgactttgtccgatttgtttcggccaccgtggcttcacaggtggtattctcgctctactcgatggtcgacggcctgatggtctccctcggcgttaacgaatacgccatgagcgccgtcaacctcgccatcccctttaccaacgcgctgttttccattgccgtgctctttgccgtcggctcgtccacgctgatcgccattgccatcgcgcaggataaacggcacgaggccaacaccctcttttcacagaattttgccacgctgctcatcctcggtgcggtcgtaacggcgctcgtgctgctgtttttggagccgttcgcccgccttctcggcgcggacgagatcacgctcgactatgtcaagcattatcttctcggccttgcgccgttcagcgtgtgctatctggtgtcctacaaccttgaggtgctcgtcaagacggacggtttcccgcgctacgcgctcttcaccgtcatcgccgggtgcctgacaaactgtgtgctcgactatatcgcgattttctggctcgacatgggcgttttcggcgcggcagtcgccacgggcatttcacagcttgtcacttgcctctcgtactttgcgcactttttcagcaaaaagtgcacgttccggctgtgcaaattccgcttcgatccgcacctttacgcgcgcatcctgcccatcggccttgccgacggcgtgacggagctgtgcacgggactgatgatcttcctcttcaaccgcacggtgctcaaatatattggtacggacggcgttgtgacctacacggtcattgcctatgtgacgtcgctcatcatccagctgatggtcggcatctcgcagggctcgcagccgctcgtgagcttccagtacggaaggggagaccgcgccgcgtgcagaaagctcctgcgctatgcgctcacgaccgtttgtatcgccgcgccggtgctcttcctcgtactttacgtctttgcgccgcagctcgtgcgcctctacctctcgcatgcgggggaggagctggtcgcgtactcggtgcgcgcgttccggcattacagcgtttcgtatctgttccttggcttcaacatcgtcatcgggggctttttgacggcgcttgagcgccccgtcccagctatcagcatttccgtcggccgcggccttgcgctgcaaagcgcggtgctgctgacgcttgccgccgcgttcggcggcgaggcgatctggtacacgcccgttctttccgaggcgatgtgccttgtcatgtcactcctgttcctgcgcagctaccgcagacagaccgatatgcaggcgtgagccccgcccagtgcgataaaataagagaaaataaaaaggccctggaagcagcgcttccagggccttttggcatcccgaccagacgctaactggcggactgacgcttagaagccagctatctcatttcatgccgtgcagtacaccgtcatttactgtcggccggttagttccgcacagatcactggaaaacaaagatttcttcgatcggcgcttcgacaacccttgcaatatcgatcgccagtttaagtgagggattgtaccgtaccaagacccgaaaggccgttaccacctatgtcagcgacaagaccattgaaaagatcatcaaacttctccgctgtgcattcaagcaggcggtacgatgggaaatcattgcaagaaatccctttgacaatgtgatcctcccgaaaacggagtatgcgaaacgggatatctggacagcggatatgatccgtcttaccctggacaaatgcacggacagcaaactctatgtagcaatgaacctttcctttgcctgttctctgcgtatgggtgaaatcctgggactgacctgggagaacgtccatatttcagatgaagatattgcggcggataatgcctatgtctacatcgacaaggagctgacgagggcttccaaacgggcgattgaaacgctgggtgagaaggatatctactacatcttcactccgcttatgccgaacaccagcacaagaattgttctgaaaaagccgaaaaccgattccagtatccgtaaggtgtggctgccgaaaacgctggcttacattctgcgggaatggaagaagtcccaggacgagctgaaaggcttcctgggtgacgagtatcaggacttcgatctggttgtggcacttcccaatggacggccctgcgaggatcgtatcatcctcaaagaatttgcaaagctccgtgaggacgcagggctgccgaaggtggtctttcattctcttcgtcattctagtaccacctacaaattaaaactcaaccacggcgatctgaaagccacccagggcgatacaggccatgctgagatcgacatgataaccagtatctatgctcacattctggacgaggatagaaaggtcaatgctcagaaattcgagacagccttctatgccaagcctgatcttcgcaacgtccgtccaccggaagaaccggtaaaattggagcctgcgaccctggaccttgaaagccttgtggagcagcttcagaagtcgccggagctggcaagtgcgctcgcagccctgatagcggcgcaagccccggcaaagtgatccgaaaaatcgaattagcaaaacgcagaattttcttagcaaatttctgaaaagcgttcgagtccaattagcaaatatacatcatgcggcgcataaaaatctcccgataacggaagtgaaattaccgggagaaggaggaacaaaaaaacgctgcaaaccccgaaaaaggcctgcagcggtgctttctggcgtcccagagaggatttgaacctccgaccccacgcttaggaggcgcgtgctctatccagctgagctactgagacatttataagctttatgcaattttcaaggctcaaaggaatcgaaccatctgccgcttaggaggctcgcgctctatccaactgagctacagacgcggatgataaaaatattttacccttttggcagtggatttgtcaatgcctgatttgctgggagcggggtggagaaaagcgcttgtattcactgccgccgtccgttataatgggacgcaagagcggctctgaccgcagacggcggacagaaccagtgagaaatattgagaaaaggacggtaaacctatggacggaaagacgatcctcccgcgcagcgaggtgcccgaggagttcacctggaatttaagcgacatatttgcgagcgatgataagtggaacgaggagctcgaagcgctcaaggcctatcccgagcgcatggccgcctacgccggcaagctcggcgagagcgcgaagacgctgctcgactggttcacgctcagcgatgagatcacggtgcgcgtttcgaagcttgtgcagtacgcgagctgccgcagcgaccaggacgtgggcaattccttctatcagggcatgcgcagcaaggcgttttccacggcggtcgcgctgaacagcgcgggctcttttgaagcgagcgagatcatggccatccctgacgaaacgcttgcgcgcttctacgccgaggagccgaagctcgagacctatcgccgcaacattgacaagctgcgccgccgcaaggcgcacatcctctcgcccgagtgcgaaaagatcctcgccgccgcgggcgagatcagcgaaagccctgaccgcacgttcagcatgttccacaatgctgacatgcgttatcccgacgtgacggacgcaaagggcgaggtccacacgctgacggacggcacgttcgtccccatgctgatgagcgccgaccgcacgctgcgcgaaaacgccttcaaggcctactacaagcgcgcgggcgagttccgcaacacctacgcctccacgctggacgcgcagttcaagcagctcaagttcttcgccgacgcgcgccgctacaattcgacgctcgaggcgtcccttgacgtgaccgaggtgccggtcgaggtctacacgaatctcattgacgcggtgcacggcaacctcgacaagatgtaccgctatgtcgagctgcgcaagaagatcttaggcgtcgacgagctgcacatgtacgatgtctacaccccgatcgtcgcggacgcggacgttgaaatctcctttgaagaggccaagaagaccacgctcgaagcactcgcggtgctcggcaaggactatacagacgtgcttgaggaggcctttagcaaccgctggctcgacgtgtatgagaacaccggcaagcgcggcggcgcctactgcaccggcaacggctggccccacccctacgtgctgctcaaccacaaggataacctcgacagcatgttcaccctcgtccacgagatgggccacgccatgcatacgtggcactcctgcaaataccagccggtgaatacggcagagtacgtcatcttcgtcgccgaggtcgcctcgacctgcaacgagatcctcctgatgcgccacctgctcggcaagaccgacgaccgcaagcagcgcgcgtatctcatcaaccacttcctcgaccagttcaagggtacactgtaccgccagacgatgttcgccgagttcgagctccaaatgggcaagatggccgagagcggcgaggcgctgaccgccgacgcgctgagcgcgaagtatttagcgctcaacaagctctacttcggcgatacgatgatctccgacgacgagatcgcgcttgagtggacacgcatcccgcacttctactacaattactatgtcttccagtacgcgacgagtttctccgccgccgtcgccatcgccaaccgcatcctgcgcgagggcgagagcgccgtcaaggactacaagaagttcctctccggcggctgctcgaaagagccggtcgagctgctgcgcgacatgggcgtcgacatgcgcacgagcgcgcccgtcaacgacgcgctgtcgctgttcggcgagctgatcgacgaactgagtgcattgctgggctgacgccttcaaatcagtggtgaaccactgatttgagcaggtttcacgtcgctttgcgcctcggttgcccgttaaaacgggcgattcgactttgcaccgttgcggcactacgattggcgcgcccttgcaggcgtgccaatcgtgccgtttcctcgaacccagctcgctgtttccgccactggcggcgcttcgctggtttccactatgcgcaaggtgttttccgccacgcaccggttgcggcggaaaacgatcaagaacatttgtgcctgcgggcacttgggcaaccgttagcagctttgctgctttacggatgcccataccccttgcgggtaaaaactgtgcgaggttgcctgcccgagaggacaggcagcctcttttcctaatttttctgcaaaagagacaaaaaaagtttcaaaaaatcttgcaaatgacgaagcggcagaatatactattacagttaaagacttacgatttgatatccctgcccagcggcaggaaggagagatcacctatgcagaatgaaaaacttcgcaatgtagccatcatcgcccacgtcgaccacggcaagaccaccctcgtcgacgaaatgctcaagcagggcggcgtgtaccgcgaaaatcaggaggtcgtcgaccgcgtcatggactcgaacgacctcgagcgtgagcgcggcatcacgatcctcgccaaaaacaccgccatccgctacggcgacaccaagatcaacattgtcgataccccgggccacgccgacttcggcggagaggtcgagcgtatcctcaagatggtcaacggcgtcatcctgctcgtcgacgccgctgagggccccatgccgcagacgcgcttcgtcctctcccgcgcgctggagctgggtcaccgtgtcatcgtcgtcgtcaacaagatcgaccgccccgaccagcgtatccacgaggtcgtggacgaggtgctcgagcttttgatggacctcgatgcgacgcccgagcagctcgattccccgatgctgttctgttccggccgcaacggtacggcgtcctattcgcccgacgtcgtcggcacggacttaaagcccctgttcgacacgatccttgagtatatccccgcgccggaggccgatgtggacgcgccgttccagatgctcgtctccgccattgactacaacgagtatgtcggccgcatggccatcggtcgcatcgagcgcggcacgctcaagcagaaccaggagatcatggtctgcaactaccacgaccccgacgccgcgccgaagaaggccaaggccgtctccatgtacgaatttgagggccttgccaagaaccccgtcaccgagtccaccgcgggcaacatcatctgcctgtccggcatcggcgacatcacgatcggcgatacgatctgcgcgcccgagtgcgtcgagccgctcccgttcgtcaagatcagcgcccccacgatggagatgacgttctccatcaacgactctccctacgccggacgtgagggtaagttcgtcacctcgcgccagctgcgcgaccgtctcttccgcgaaacgctcaaggacgtttcgctccgcgtcaccgagctcgagggctcgacggacgcgttcaacgtcgcgggccgcggcgaaatgtcgctgtccatcctcatcgagaccatgcgccgcgaaggctatgagttccaggtctcgcccccgcgcgtcctgtatcagatgatcgacggcaagaagtgcgagcccatcgaacgccttgtgtgcgatgtgccgcaggagtatgtcggcgcagtcatcgaaaagctcggctcccgcaagggcgacctcgccgagatgacgccgatcggcagccgcatgaagctcgaattcctgatccccgcgcgcggcctgttcggttaccgcaacgagttcctcaccgacaccaagggcgagggcatcatggcgagcgtgtttgattcctacgcaccctacaagggcgagcttgcccgccgcaacacaggctctctcgtcgcctccgaaacgggcacgtccatcacctacggcctcttcaatgcgcaggagcgcggcgtgctgttcatcggcgcgggcgtcgacgtgtacgagggtatggtcgtcggtcagtcccccaagcaggaggacatcacggtcaacgtgtgcaagaagaagcagctgacgaacatgcgcgcttccggctcggacgacgcgctgcgccttgtcccgcccaagcagatgagcctggagcagtgcctcgagttcctcgccgacgacgagctgcttgaggtcacgccgaagtctctgcgcatccgcaagacgatcctcaacaaagagctgcgcatgaaggccacccacggcaacaaaaaggttttgcagtaatgcagatagagaagcgacggctgaaaagccgtcgctttttgattttctgcacgaaagtgcggggggagggcagcgccatcggcgctgcacggggcaaaaggggagattctctttcaaaagagaacctccccctttggaacccccaagagaaaggcagggggcgtttcgacttcgccccctgcaccccctaacgaccaaaagggaggggcgtagcccctcctttttggattatcctccctgtggtacttccggtaagaactgcgcctgcttcggatgatgccgtctcgataatgcctgccgaagcggcattgcttcgctcgccgcataaaataaaacgaccgcagtggcggtcgttttattttaattcctgttcgagatcgtggaagtattcggggcagaaaaattcatcgacggtgatattcaggccgtcgcagagctttttgaccgttgcgacggtcgtcgtgtggtttcggccgctcataatgttattaagcgtggattgcgtgacgccgctgaggatgctcaagcggttgattgtgatacttcgttcttcgcacagcgccaaaatgcgccgccgcacggcttcacccactgtcatcacgaccaccccgctttcttttcataaagaatatcgttttcctcttgaaaagattaactcttttgggttaaaataaccgaaaagggttaaggaggtgtctgtaatgactgactatcagaaaatgtacaccacgctattcaacgcagtgaccgatgcactcgaaaaaatggaagtgcaaaactacggtgatgcaaaagaactgcttatctccgctcaacaaaagacagaagagatctatatcacagcacagaactaaaatagaagcaattctgaacgcggcgagcgcagcaatgccgcgccgtcagaagcaacagcggggaagataatccaaaaaggaggggcaaggtccctcccttttggtcgttaggggtgcaggggcgagatcgaaacgcccctgccgttctcttgggggatcaaaagggggtattctctcacgtgagagaatgcccccttttaccgcactcccctgcgcggcgcagggaattatcccgccgctctgcgagcggcattattctttattcggttcaggatcgcccgccagcgaatcgagatacagatacagcggcatcagctcgcggaagcccgcgaggacttcgtctttgagctccggcgtgaacagcacgccttcgggattgtcgtcatagccgacggcgatatttttcgcgttgtaccacgggttcaggagcttgccgacgtcgcccttcgggcgcttgaactgctcgccggagagcgtgaagcgggacttattcagcttgcgcacgagcttttcgagctttttggggtcggtctcgatgcggcggcggagcttggccatcgtggcgggggaggcgtcccagtagccgcagccgtagctgaagtagttcggtgcgagctcgaaatacagcgcggggacgccctcgaagcgctcgtgcgggcgctcgatcgtgaaccacaggtggtccttatacggccctctgccgaagagacggcgcgcgtcgcggtagatgcggcagacgtgtaatttcagcgactgcttgggatattccacggcgatcgcgtcaaaaatttcgctgccgagctcgcgcatcggccggtcaacgagcgcgaggaactgctcctttcgcggcaggaaccactcgcggttgttgttgaatttgatgccccagaggaactcgacggcctcgggcgtaaaaccttgaaacatgatccacctcaaagaaaaatttgcaacgatggcagtataccaccgaaaacgcgaaaaaaacaagagggatctcgcaccagatccctcttgtctcagaggagcaccgtcctgtttttacccaaaaacaggaacaggaaaaagctaagttacttcgtggcgtggtcgaccgagtacatgtgctcgatgaggtcgagcaccttgttggagtagccgatctcgttgtcgtaccagctcacgaccttgacgaacgtatccgtcagggcgataccggccttggcgtcgaagatggacgtgcgcgtatcgccgaggaagtcggaggaaacgacctgctcgtcggtgtagccgaggatgcccttgagctcgccctcgctggccttcttcatggccgcgcagatctcatcgtaggtggcgggcttttcaaggttgacggtcaggtcgacgacggagacatccagcgtgggaacgcgcatggacataccggtcagcttgccgttgagcgaggggatgactttgccgacggccttggcggcgccggtggaggaggggatgatgttgcccgtggccgcgcggccgccgcgccagtccttcagggacgggccgtccacggtcttctgcgtggcggtgacggagtgcacggtggtcatcaggccatccttgatgccgaagcagtcgttcaggaccttggcgatgggggccaggcagttcgtggtgcacgaggcgttggagacgaactgcatgtcgctcgtgtaggaatcgaggttgacgccgcagacgaacatcggcgtgtcatccttggacggggcggacatgacgaccttcttcgcgccggcgtcgatgtgcgcctgcgccttttccttcgtcaggaacaggcccgtggattcgacgacgtactccgcgccaatcttaccccagggcaggtccgcggggttgcgctcggcgaagacggggatctcgcggccgttgaccacgatgccgtagtcgttgctcttcacatcggcggcgaatctgccgtgcatagtatcgtacttcagcatgtaggccagataatcggcggggcagaggtcattgatgcccacgatctcgatctcaggatggttcaggcttgcgcgaaagaccatacggccaatgcggccaaagccgttaataccgaccttaatactcataaaacttacttccttcctgcttatcggaatatatcgaatgtttggtacatttagatattatatagcagtagtttcgttttgcaagtccttttttgcaaaaactctatttttttcataatttccacaaattccttgctttttgaccgaaattttgctaccctcatactacaacgctgtacaacaaaacgttctaagcgcgagcttatcgcgaaaacaccaattctttccgcgcaaactccgcctccctgcggtgaatgctaccggtaggagaacttttattaggagacgctatgcgggattatactgaagaagaactgaaaatgctgtcggatgtgctgccgaatattgcattgcagctgcgcacctcgctttcgacgatctacacggcggtcgaccgcctggcaccgcaggagacgcgggagaaggacccgaagactgaccgcaccgccgcggcattttaccagagctattaccagctctaccgcctcatcagcaatctgactgacgcggggaacctgttcgagcgcaagcgtttcgagctctacgatgacgacattgtcggcgtctgccgcagcgtgtgcgctgaggtggacttcctttttgcgcagcgcggcgtggagctcgacttcctcgccgaccgcgacagccgcatcatcgccctcgacgccgaggccatccgcaagctgctgctgaatctcctctccaacgcgcttaaatttacgcccaagggcggcagtgtccgcgtgcgcgtgaaaacggaggggagatttgtcaagatcaccgtggcggacacgggaaagggcatggacagcgacacgctggcccatttgttcgaccgctttatggacggcgggcaggaccccatgccgccgcgcggcttgggactgggccttcccatctgccagcgcatcgcgcagggccacggcggcatgatcgtcgcgcagtcggaggagggaaagggctcgctcttcaccgtctcgctccctgcggtaaaggccgggcgcgtacagctcaaggatcgcggcagcgactacgccggcggcttcaaccgcacgctcgtggagatgtccgacgcgctttcgagcgaggcatttctgcaaaagtatctggattaagggacacagatgaagaaaaaagttttgatcgccatgagcggcggcgtggattcctccgccgccgcgcttttgctgcaaaagcagggctacgagtgcgcgggcgcgacgctgtcgctctgcggcaacgagacggacggcgcgaagcgcattgccgacggtctcggtatgccgttttacatcttcgacgagcacgagctttttgcgcgcgaggtgatggatcacttcgtcagcgagtaccgcgcgggccgcacgccgaatccgtgcatcgactgcaaccgctgcctcaaattcggtgcatttttggaccgcgcgctggagatgggctttgactacatcgcgacggggcactatgcccgtgtcggctatgacgaagcgagcggacgctaccggctgctgcgcggcgagagccgcgcgaaggaccagagctacgtgctctatcagctcacgcaggaacagctatcgcatcttctgctgccggtcggcagctttgaaaagccggaaattcgcgaacaggcggaggaagcgggctttgaaaacgcccatcaggccgattcacaggacatctgcttcatccccgatggggactatgtgcgctttctgcacgactacggcggcgtcacgccgcagcccggcgactttgtcgacgaaacgggccgcgtgctcggccgccaccgcggtttggagtgctacacggcgggtcagcgcaagggcctcggcgtgagcgcggaccgtccgctctatgtgatatccaaaaatgccgaaaataataccgtgctgctcggcgacaacgaggaactgttttcctcggcgctgctcgcctcgcgcgtgaactggattgcgggggagacgcctgcggaaaaagtctattgcaccgccaaaacgcgctacagccagaaagagtgcgacgccgtcgtcacaccgctggaagaaggctgcgcgcacgtcgagctcctcacgccccagcgcgccgtcacggcaggacaggccgtcgtcttctatgatggcgaagaggtcctcggcggcggcacgatcgaaaaggcgttataaaagtgagaaaaggctccgcgaaagcggagccttttggcatattatcgttcgctgacatgcgcctcgctgccgaagatcatgtcgtccacgtcgccatgacggatgttgtctttttccttcattgtaccattcctttcagcttttctctcacccggctattatatgcgcgagcaaacgaaaagttgtacgaaaaaggacagcagaggataaaaaagcgtctcgcagatttttacgcgcaagagggacattgtatctgcaagatcaaaaagcgtcgcagactttcgcgtccgcagacgcgaaataaatttcgatcataaatcgccgcgacatgtgcgtggcgatttattcttctcgctctgcgcgtgtcgcagccgccctgcgggcggcaaggcacgaagcggagtgtgatccccctcaaaaaagcggctctgccgcttttttgaagttaatagcgatggtttaggatatccaccacgtccgccagcgcgccgtccttgcagtggcagacgatgtgcgcaccccattccttgacctcggggatggcgttttcgggcgcgaagccaatctcggagacctcgagcatcggaatgtcgttgttgtggtcgccgatgcagtagatgtccttgcgcgcaacgccgaggagcttggcaagctttaagatcatgccgcccttcgtcgcgccgcggcgcgtcagctcaagcaggtgatcgctcgaaaagatgagctcgtagcgttttccccagtcccgagagacaataaaatcgcgcacctgctccaaaagcggcttttcctcttcaaagagcagcttgatgatcggcaggtccacctcgcggaagtccttgacctcctcggtcttcgcgcgcgtcaggtgctcgtggttgcgcgtgtagtcgttcgggtgcaggacgtggatgcggcggtcatcgtgataaatttcaaaacacaggccggggaagcgcgcgagcagcgcgtcgacatggtcgtagatgtccgcgtctaaaaacgcggtctccacatagcagtccttgttgaagtcatagatggccgcgccgttggcgatgacgcagggggcgttgcagggcagatccttggcgtagcgggcaaaggcgggcagcgcacggccggtggagatcgaaaaatagccgccgttttggatgaagtactcgaccgcctcgcggttgcgcgcgctcatcggcgggatgtcctcaccgcgctcgagcgcgccctgcgtatagacgagcgtgttgtcaaagtcgctggcgagcagcaccttgttgaatttcagcatggttgttcctctcttcttctctcgttgtttttcgacgaaagtataccacggcgcgggagaaatgaaaagggatgttttgcgtaaagatatcagccgatgatgccgaattttcctttgataaaatgacggtagtcgggctgcttttcggcattttcgtattcatgtttcatggtttgccatatccaggcgcggaacggatcgccggtctgcgcatagtgcagaatgcgcagcagcccctcccgctctgcgcggagaatggcctcataggcatcaggaacgaactcgtacgagacgactgctaccgcctcttcggacgtgaccgcgaacggcacgtcggaaacaggggcggtatttgccggttccgcgccgtagatatagccggagacgccggcataggtctcctccagtgcgttggggtagtattcctccagccgctgcacgccgtctaagtcgaagccgtaaggcccccatttttcccaccggcccgtgtggacaaagccggtgtcgcggcagtatttttcaacggcattgctcagatagaccagcacattttcccgtttcttcgaaaaatagacgagcgggtggccatggttggagacgtgcggcgtgaggacggtgagaccgccggtgggggaggcatggtacagcatggaagcaattcctttccgccttttggcaaaaccgccgcgaaacaactgtgcttcgcggcggttctatttcttgtttacgcttcgctcttcggcgcgggattttcgccgctctgaccgccacttctgcggcggcctctgccgccgcggtggctgcggcggcgctgcttgttctcgccgccctcaatcgagccctcggctttcggcgggcggggcggacgcggggctttcggcgcgtcgggagtttcgctgttcggcttgctctggcgcggggcgcggcgctcaccgttcttgtcgggattgcggggcggacgttcgctgctcggcttatcgccgcgcgcggggcgttcgcttcgcttttcggcgggcttgtcgccgcccttttggggtgcggtttcgctcttcggcgcggcggacttctcgccgccttcaccgctgcccttgccgcggcctctgccgccgcgatgaccgcggccgccgcggcgggaacggcgcttttctttctcctcctcgtcagcgacgggggcgtccgctttcgcgacgggggccgtccactgttcgggcggcacgatgggcttggcagacgagaagaagttcagcgtcagctgcggctcctccggcggttcctgatagcgctcgggaagcgtcgtggggagttcgatgccgtcgcgcgagcccttgccgttgcgaagcacctgaatttcgcaggtgcggtagcgcttggggctctcgttctgcccgtcgaggcgcacgagcacctgctcgcgcagaatgtcgaccgagctcacgttgccaaggccgtcgggcgttgcgacaaacgaatcctgcttcgggcagcggcgcaccgcgtcctcgtaggcgttctgctcgtatttgaggcagcacatgagtctgccgcatgtgccggagatcttcgtcgggttcaggctcaaattctgcgtcttggccatcttgatcgaaacggggacgaagtcgtccaaaaactgcgagcagcagaaaggccggccgcagatgccgaggccgccgagcatcttcgcctcgtcgcgcacgccgatctgccgcagctcgatgcgggcacggaacacaccggctaagtcgcgcacgagctcgcggaagtccacgcgcccatcggacgtgaagaaaaagatgatcttgctgccgtcgaagttgctctccacgcgcacgagcttcatgtcaagcccgcgctcggcgatcttcttctggcagacctcgaaggcgttcttttcgcgcgttttgttgtaggtgtaggtgcggtcatcgttctccgtcgccacgcgcacgagcgggcgcagcggttggacgacggaatcgtcctccacctcatggttgcccgagacgcactgggcgtactcgagcccctgcgcggtctcgacgataacgaactggttgggttcgaccgtgatgccgtgcgggtcaaaataatattccttgcatccgccgcggaagcggactccgatcacttctgtcaaagggtttcctccaattcaacggcgaagccgcccagcgtgggcccgacgccgacgttataggtgcatttattgcggtagtcctgcaataaatctattgtgccgagtaatttggcttttgtcaagcgcgaagccagtgaccgcgcgatgcgaagcgcatcttccggcacgctcacgccgtactgccccagcagggcggacgagagcagaagccgcgttccctcgaaaagcgaggacaggtcgtcgcgcgtgaccttctgcgtttcgagctttgcgaggaatgccgcgcgggacgcgcgcgacccctcggcgatgagccgcgcgagctcgatctcgcgctcgtcaggcgcgccgccctcttcgacggtgggggagagcttgacctccacgcagcgcgagcggatggtctggagcagaaccgccggattttccgcgcagaagaagaacgctgcgtaagcgggcccctcctccacgagcttcaaaagcacgttctggtccttttccgtcaggatggtgcagtcctcgaaaatgtagaccttgcgcgcgccctcgttcgggcggatgaacgcgtcggcgcgcatcgcgcgcaccgtgtcgatcgagagctccttgtgctctgcgtcgcgcacgaacgtgacgtcggggtggatgtcctgcattaccttgcggcaggcagggcaggcgaggcagggcttgctttccgctgtgcactccatcgccgcggcggcatagcgcgcagcgctcacgcggtcgccgctgccgctgaaaatgagtgcgtgcgacagtgcgccgcgctttgccgcggcgcgaagccgcgccgccgtatcggtttttgcaaaatccaaaagctccattgcccgctccatgctctgtactctgcgcgcattttcagcgcaaatttaaaaatagtatatcgcaaaagtgcggcgcttgcaagaaaatccgcgccccgcgacggaaaaacagaacgattttgcgccaaattgcgttttgcgggagaaaaaatgcggaaagtcgacaaaaatttcacaacttgttattgaaagtcggggattttctgtctataataatatggcttgataatgatcacacagcgatacatttttaatggaggaaaaccaatgagcaaaaagtatgtctacctgttctcggaaggcaacgctaccatgcgtgagcttctgggcggcaagggcgcgaacctggccgagatgaccaacatcggtctgcccgtgccccaaggcttcaccatcacgaccgaagcctgcacccagtattacgaggacggccgcaagatcaacgacgagatcatggcagagatcatggaatacgtcgcgaagatggaagagatgaacggcaagaagttcggcgatctgaagaaccccctgctcgtctccgtccgttccggcgcgcgcgcttccatgcccggcatgatggataccatcctgaacctcggtctcaacgacgacgtcgtcgccgccatgatcgcgggcaaccccgaccccaacttcgagcgtttcgtttacgactcctatcgccgcttcatccagatgttctccgacgtcgttatggaagtcggcaagaagtattttgagcagctcatcgacgcgatgaaggaaaagcgcggcgtcaagctcgacatcgagcttaccgcagccgacctcaaggaactcgccgagcagttcaaggccgagtacaagcagcagatcggcgaggacttcccctccgaccccaagacccagctgtacgaagccatccgcgccgtgttccgctcctgggacaacccgcgcgcgaacgtctatcgccgcgacaacgacatcccctattcctggggcactgccgtcaacgtcatgccgatggtcttcggcaacctgaacgacaactccggtaccggcgtcgccttcacccgtgaccccgccaccggcgagaagaagctcatgggcgagttcctgaccaacgctcagggcgaggacgtcgtcgccggcgtccgcaccccgatgcccatctcccagatggaagagaagttcccccaggcttacgccgacttcgtcaaggtctgcgacctgctcgaggatcactaccgcgacatgcaggacatggagttcaccgtcgagaacggcaagctctatatgctccagtgccgcagcggtaagcgcaccgcgcaggctgctctcaagatcgcctgcgacctcgtggacgagggcatgatcgacgagaagaaggccgtctccatgatcgacccgcgcaacctcgacaccctgctccatccccagttcgatgcggctgtcctcaagaaggctcccgccatcgccaaggctctgcccgcctcccccggcgccgcctgcggcaagatcgtcttctccgctgaggatgccaaagagtggaaggagcgcggcgagaaggtcgttctcgtccgtctcgagacctctccggaggatatcgagggcatgaaggcctcccagggtatcctgaccgtccgcggcggtatgacctcccacgcggctgtcgtcgcgcgcggcatgggcaagtgctgcgtctccggctgcggcgagatcaacatggacgaggagaacaagaagttcgagctcgccggcaagacctatcacgagggtgacttcatctccatcgacggctccaccggtaacatctacgacggcatcatccccacggtcgacgccaccatcggcggcgagttcggccgcgtcatggcttgggccgacaagtatcgccgtctgggcgtccgcacgaacgccgataacccgcacgacaccgagcaggccgtgaagttcggcgctgagggcatcggcctctgccgcaccgagcacatgttcttcgaggctgaccgtattcccgccatccgcgagatgatctgctccgacaccgtcgagcagcgcgagaaggcgctcgctaagctcgagccgatgcagcagggcgactttgaagccatgtatatcgcgctcgagggccgtccgatgaccgttcgcttcctcgatcccccgctgcacgagttcgttcccactgaggaagctgacatcgagcagctcgccaaggacatgggcaagagcgttcaggacatcaagaacatcatcgcctccctgcacgagttcaaccccatgatgggccaccgcggctgccgtctggccgttacgttccccgagatcgctgccatgcagacccgtgcggtcatcaaggctgcgctgaacgtcaacgccgcgcatcccgactggaacatcatccccgagattatgatcccgctcgtcggcgaggtcaaggagctcaagtacgtcaaggacgtcgtcgtcgaggtcgctgacaagctgatcgccgaggccggcagctctatgaagtacaaggtcggcaccatgatcgagatcccgcgcgccgctctgaccgcggacgagatcgccaaggaagcggacttcttctccttcggcacgaacgacctgacccagatgaccttcggcttcagccgtgacgatgccggcaagttcctcggcgcgtactacgacaagaagatctacgagagcgatccgttcgcccgtctcgatcagaccggcgtcggcaagctcgtctccatggccgccaagatgggccgcgagaccaacccgcacatccacctcggcatctgcggcgagcacggcggcgatcccacgtccgtcgagttctgccacaaggtcggcctggactatgtctcctgcagcccgttccgtgtccccatcgcccgcctcgccgccgctcaggctgcgatcaaggacatgcagtaagcaaatcgctttcggcataggcttttattgaatcaaacaagcgcccagccattcggctgggcgcttgtactttgtaaaaagatgtggtaggatgtggaccaatcagatgttggatgggaaaggggagagtgcatggagatcaaacccttggatagggagacgtatgcgggcaaaacgtttaccgcccgctaccgcacaaacggttattatgagatccgcccgtccgagacgggctttcagatggactatgtaccctttgcggagccgactgagagatcgttcgacgatgtattcttcggcgaatggctcgaagacccgatcgccttcggcgcgttcgagggcgaaaaactgatcggatatgtcgaaggctcaatagagggctggaacaaccgcttccgcatcagcaacatctgcgtgctggacttttccgaacgcagcaggggcgtcggcacggcgctgatgaagaccatagagcgagcagcggaagacgccggggcgcgcatgctgattttagagacgcagtcgtgcaatgaaaacgccatcgcgttttacaaaaagaacggtttcgaaatcgtcggtttcgacctgtacgcctactccaacgacgatcctgaacggcacgaggtgcggatcgaaatggggaagaagctgcactgagcgccggttttgcatcttaaaagcttttttcaaaggagaacacggccatgctgttactgcttcagatcattttatgttgtcttctgtatctcgcgctggtcaaatgcgcggtgcgagacagcgggcgcaactgcctctatttttacccggacgcgtatctcgacgaggcgcagaagcgcggcatcgccgacaagactgaggagctgcgcaagggcaagcgctttatgacgttcttctgtcttgtgatctttgccgtgctggtcgcgatcatcgctggatggaacggcgtgaaggacttccataccgcctgctttgaagcctaccttttcctcgtggtgatgaactggttcgacggcctcgtcatcgacctgctgtgggtcggccacagcaagatctggcgtatcgagggcatggagggggttccctacgtgaagccgtggcgggcggtcgtcaccaagcgcagtgcggccacagcgctgtaccttcttgtcgcggccgcggtcggcgggatcgttgtgctgatcggcaaaatctgaacagcggaagaaaaaaggttcccaagccattggcttgggaacctttttcgcatcgccgcgcgatgcagaggatcaaaggagaggttcacaaagaagtttggaagagatcgtttcagatacggctgcggatctccgcacccatggccttgcagccgacgagttggcagttttcctgcatgatgtcgccgcagcggaagcccgaacgcagcgttttatccaccgcgcgctcgatggcgtcggcctcggcggccatgtcgaagctgtagcgcagcatcattgcggcggccaggatcgtgccgatggggtttgccttgtcctgccccgcaatgtcgggcgcggagccgtggatgggctcatagagcccgttcgtgccgtcgcccatgctggaggacgggatcatgccgatcgagcccgtgatctgactcgcctcgtcggagaggatgtcgccaaagaggttttcggtcacgatgacgtcgaactggctcgggtcgcgcacgagctgcatcgccgcgttgtcgacatacatgtggcgaagctcgacgtcgggatagtcttttgcgacctccgtgaccgttttgcgccagaggcgcgaggtgtcgagcacgttggccttgtcgatggaggtgacgcgcttgcggcgcttgcgcgcggtctcgaacgcgacgcgcgcgacacgcttgatctcatgctcggagtaggccatgatgtcggtggccttctgctcgccgttcgcctcttccgtgcggtgctcgccgaagtacacgccgccgatgagttcgcgcacgacgatgaagtcgatgccgccttccgcgatgtcggcgcgcagcgggcaggcggcggagagctcggagaacatcttggcggggcgcacatttgtatagagacccatgccctcgcgcagcttgagcagaccgcgctcgggacggttggcggcgggctgattgtcccacttcgggccgccgaccgcaccgagcagcgcgctgtccgcgttgcggcaggtcgctaaactcgaatccggcagcggcacgccgaatttatcgatggcgttgccgcccatcggcgcgtcgacgtaggtgaaggtgtggccaaacttcgcggccacggcgtctaaaacgcccatggcctcggtgacgatctcggggccgatgccgtcgcccttgatgatggcaatggtcttgttcatttcgccgcctcctttgccttgagcgaggccatcaggccgccgcgcgcgatcatgtccttgataaacggcgggaagggctcggcctgatacgtcgtgccctttgtcgcgtctgtgatgacgccggtgtcgaagtcgactgttacctcgtcgccgttttcgatctccgcgctcgcggcggggcactccaagatggcgaggccgatgttgatggcgttgcggtagaagatacgggcgaaattcgccgcgatgacgcaggagatgccgctcgctttgatggcgacgggtgcatgctcgcgcgacgagccgcagccgaagtttacacccgcgaccatgatgtcgccgtctttgacgcggtggatgaagtccttgtcgatgtcctccatgcagtgggaggcgagctccttgtggctctgggtgttcagatagcgcgcggggatgatgacgtccgtatcgacgtgatccccatacttatggacaatgccgtgtgcattcatttgttcatgacctcctccggatgagaaatgtggccggtaatgcccgatgccgcggcgaccgccggggaggcgaggtagacctcgctgtcgacgtggcccatgcggccgacaaagttgcggttggtggtggaaacgcagcgctcgccggcggcgaggatgcccatgtagccgccgaggcacggcccgcacgtgggcgtggagacgatgcagcctgcgtcgaggaaaatgtcggtgtagccctcgtgcatgcaggcgcggtagactgcctgcgtggcggggatgacgatgccgcggacgttcggggccaggtgatggcccttcaggatcgcggcggcagcggccatgtcggggagctggccgttcgtgcacgagccgatgacgatctggtcgatggtgatgtcgctgccctcgtgcgcgctgtgcgcattttcgggcaggtgcggccaggcgaccgtgcagtcgacattgccgaggtcaatgtcgataatgcgctcatattctgcgtcgggatcggcctcgaacgctgcccaggggcggtccacgcggccctcaacataggcgcacgtcgcgtcgtcgacggggaagatgccgtttttgccacccgcctcgatggccatgttgcagatcgtcaggcggtcatagatcgtgaggttcttgacgccctcgcccgcaaattcaatggactggtagcgtgcgccgtccacgccgatcatgccgatgagcgtcaggatgacgtccttgccggagacgaacggacggagcttgccggtgagattcaccttgatggcggacgggaccttgaaccacgtctcgcccgcggccatggccgcgcccatgtcggtcgagccgacgccggtggagaacgcgccgagcgcgccgtaggtgcaggtgtgcgagtctgcgccgatgactgcctcgcccggggcgacaagcccctgctcgggcagcagcgcatgctcaatgcccatcgtgccgacgtcgtaaaaatggtcgatgtcgaagcggcgggcgaaggtgcggcactgcttgcactgcgtggcggacttgatgtccttgttcggtgcgaagtggtccatcaccatcgcgatgcggctcttgtcgaagaccttttcaaagcccgcggactcaaactcgttgatggccacgggggtcgtgatgtcgttgccgaggacgaggtcgagctttgcctggatgagctggcccgcgcgcacgctctcaagtcctgcgtgcttggcgagaattttctgcgtcattgtcatgcccatgtctcgtttctcctttcagttgccggattccatgatcttgttgatgccgttgacgtaggcgcggatcgacgattcgatgatatcggtcgagagacccgagccggtgtacgaccgcccgtcggggccggagaccttgactacggcctcgccgatggcgtcctcgccgtccgtgacggcgttcaggctgaaactctcgagcttcacgtccatttggagcatgcggttgatagccttgaacgaggcgtccagcgggcccgtgccgatggcgacatcttcgatctgctcgtcgccgcgctggagcttgatgcacgagatgttcggcacgccgtggcccgtgttgaccacatgactcacgagctggcagctgccctgcaccgcagcctggcggtggagcacgagcgcctcaatgtcgctgctcgtgatgttctttttcttgtcggcgagatccttgaagcgggtgaacacgctttcaagctcctcgtcgctcaattcgtagcccatggattcgagcttttcacgcagcgcgtgcttgccggagtgcttgccgagcaccatcgtgttctgcgggatgccgacgtcggtggagttcatgatctcgtacgttcttgcattggcaatgacgccgtgctgatggatgcccgactcgtgcgcgaaggcgttcgcgccgacgatggccttgctcggcgggatgggcacgcccgtgatgttgctcagcagcttgctcgagcggtagatctgcttggtgttcacgccggtttcggcgtcgtagaagtcctttctcgtgcgcagcgccatgacgatctcttcaaggctcgcgttgcccgcgcgctcgccgatgccgttgaccgtgcattcgacctgcgtcgcgcccgcgcggacgcattcgagcgaattcgcgaccgccatgccgaggtcgttgtggcagtggacggagatgtcgacatgcccgacgccctcgatgttttcacgcaggtaggtgatgaggtcatacatctcctgcggcgtggagtagccgacggtgtcgggcacattcagcgtcgtcgcgcccgcggcgacggcagtggagtagcaatgggccagaaatgcccagtcggagcgggaggcgtcctcggcggaaaactcgatgtcatcgcaatagctcttggcgtaggcgaccatctcgcggatgcggtcgatgacctgcttgcgcgtcatcttgagcttgtactccatgtggatgtcgctcgtcgcaaggaagacgtggatgcgggggtggttggcttccttcacggcgtcccacgccgcgtcgatatcgcccttggcgcagcgcgcgagcgaggcgaccgtgcagttcgtcaccgcggcggcgatggcctgcacgctcttgtggtccatcggagacgcgatggcgaagcccgcctcgatcacgtcgacgcccagcttttcaagctggcgggccatttcgattttttccgtcagattcatgctacagccgggggactgctcgccgtctcgtaaggtcgtgtcaaaaattttaatgcgcttcatggggtgttcctcctgcttttttctttcgcatagcaacaaaaaaagcctccgtctcttcccttgaagagacgaaagctcaaaacttccgcggtaccactcttgttggcatatgaaatgcccgctttctgcatcggcttgaaaatcaaacgaatgcgcctcgttggtaacggtgaggagatccggctccgcctaaacgaatgtctcagcgaagctactcaggggccagtgacatcatcccgctctgcattgcctcgcagcgaccggcaactctctgaagcgtctgtgggacgaatttttccccgtcacggtatttgtgaactatgagatttaatgatgctactataatcgcccgcccccgttttgtcaagcagggaaaaagaaatttgcgcttttgacaaaaaaacgcgcggcggaaaaacatattttgcgtactttgaacggagaaaaaggcaaaaaagcaagaaaaaaagggaacgcgcaagcgttcccttttttgccaaaatttcttacctgccgccgaagatcaggctgccgagccccgtggaggtcaaaaacagaatgagcatgacgatggggacgatgtacttcatcatcacgctgtagagcttggcgcggccaaagtgttcgccgtttttctcgacctcggcgatgatccatttcggacccacgatccagccgaccaaaatgctcgtgagcaggctgataaacggcatgaggaagctgttgctgatgtagtccatcacgtcgagcagctgcgcggtcgagccgttgggcagcgggagctcgaagtagagcgcgttgtagccaaggcagatgagcacggcggtgacgagcgagtagacgcccacggcggcgcacatctccttgcgcgacttgtggaaaatctccatgcagttggcgacaagcgtctccatgacggacacgcagctcgtcagcgcggcgaagccgagcgcgaggaagaacaccgcgcccacgacgcggcccacgccgcccatcgcggcgaagaccttcggcaggctgatgaacgttaggctcgggccgctggccatgccgtcggtgccgaggaagacatagacggcggggatgatcatcaatcctgcgaggaacgcgacgcccgtgtcgaaaatttcgatctggttgttggccttgttgaggtcgacgtcgtccttgacgtagctgccgtaggtgatcatgatgcccatgctgacactgagcgagaagaagagctgactcatcgcgtcgagcgcgatgttcaaaaagcgctggacggtcaggcccgtgaagtcgggcttaatgtagacgagcaatccttcgatacccgtgcgcgtcatgccgctctcgtcggtgtaagagagcgtgagcgagaagatggcgatgccgatgatgagaaggagcagacccggcatgatgtagcgagagtatttttcaatgcccttttccacgccgcagtacacgacccacgccgtcagcgccaaaaagatcagcatgaagacgatgggcgagacgggggaggtgatgaacgaggtgaagaacccgtcctgcgcggcggcatcgccgcttgagacgaggtagagggtaaaatacttcgtgatccagccgccgatgacggagtaatacatcatgatgagcgtggggacgaggaaggtgaggtagcccaaaaacttccacttcttgttgagcgttgcaaaggcgttgagcgcattctgctttgtgcggcggccgatggctacgtcggtcgtcagcagggtgaagccgaatgtcagcaccagcacgaggtagacgagcaggaacagtccgccgccgtccttggcacagagataggggaagcgccagatattgccgacgcccaccgcgctgcccgccgcggccagcacaaagccgagcgagccgctgaaactactgctttttttcatgttcgattctctcttttttttcatgtaaatggaatgactaatgccccattatagcagaagaaaccgaattggcaaggggagagacgctaaaaatgcaggaattcttgcgaaaatgtgaaaaaatatctcaccagcggcttgctaatgagatattttattcataacaggattagattttgtcatggccggcggcttcgtcggtgaagacggcctcgaattcctcagcgctcatcgtctcgtgcgcaagcaggaattccgccacggcgatgaggtgcttctgatcgcgcgagaggatgtcctcgcagcgctcgtaggccgcgtcgacgatggacttgacctcctcgtcgatctgtgcggcgacctgctcggaatacggcttggcctgcgccatcgagcggccgatgaaaatttcatcgtggccggattcgaacgagatcgagccgagcctgtcgctcatgccgtacaccgtgaccatcttgcgcgcaatctgcgaggcgcgctggatgtcgttcgacgcgccggtcgaaatgtcaccgagcatcagcttttccgccacgcgcccgccaagcagcgagacgatctgctcttccatatagcgcttggactggtacgagcggtcctccgtgggcagcgagatcgtcatgccgcccgcgccgccgcgcggaacgatcgtgatctggtgcacagggtcgtgcgtcggcagcgcgtgcatcacgatggcgtgaccggcctcgtgataggcggtcagcttgcgctcgtgctcgctgacgacgcggctcttcttctcgggacctgcgatgaccttgatctccgcctcggagaaatcagccatcgtgatgagcttgctgccgcggcgcgcggcgagcagcgccgcctcgttcgagaggttctcgaggtctgcgcctgtgaagccgggcgtgcccttggcgacggtggagaggtccacatcctcggcaaggggcttattcttgacatggatattcagaatctcctcgcggccgcggatgtcgggaagccccacgtagacctgacggtcgaagcggcccgggcgcagcagcgcggggtcgaggatgtcggcgcggttcgtcgccgccatgacgacgacgccctgattcgtaccgaagccgtccatttcgacgagcagctggttgagcgtctgctcgcgctcgtcgtggccgccgccgaggcccgtgccgcgctgacggcccacggcgtcgatctcgtcgatgaagatgatcgcgggggcaactttcttcgcctgttcgaagaggtcgcgcacgcggctcgcgccgacgccgacatacatctcgacaaagtcagagccggagatcgacaaaaactgcacgcccgcctcgcccgcgaccgcgcgggccagcagcgtcttgcccgtgcccggagggccgacgagcagcacgcccttggggatgcgcgcgccgaggtcgatgaacttgcccggcgctttcaaaaagtcgacgatctcctgcaattcctctttttcctcatccgcaccggcgacgtcagagaacgtcgtggggcgcttgttgtctccgccggtcttgaacgacgccgtgccgaacttcgccatgcggtcgccgccgcctccgcccgcggagcggacggagaggaagtaccagatggcgaaaatgccgagcaccgctaaaatataaggcgcgaacatcgcgacatagttgatcgagtggtcggcggtgaagtcgtagtcctcgatgatgccgtcggccttctgctgctcgatgagctcgcctaagtcgtcatagaagagcgtcacgctgaaaaggtcctttttgagctccgttttgccgtcgatgggctcgcgcagcttcatgcgcagcgtggtgtccgtcaccgtgaaggccgagacctgctcggattcgaacagctcgcgtacctcggcatacgacggttcggcctccaccggcttgttcataaagccgtagacgccgacgagcaccagcagcaccagcagatacggcaaaagattgggacgcttggtctgttgagtcaatgggatatcctccttgcactgcaaagataaaagcctcgcagagtttctgcccgcaaggggcacgcgacatccgtagagcagcagagttgctaacggctgtccagacgcccgcaggcgtgaaaaaatgtgagatcgttatttccaacgacaagtgcgtcggaaataacaccgctcgctccgcaaacgtgcgagcgatagcgagtgcgctgcagcggagtgcagccttctcaaaaaacagcgtttgctgttttttgaatcagttggcgtaaacctcgggcttgagcacgccgatgtacggcatattgcggtacttctgcgcgtagtcgaggccgtagccgacgacgaattcgtcgggcacttcaaagcctgcgaggtccgcaacgacgggcttggtgcggcgggagggcttgtcaagcagcgtcacgaccgtcacgctggaagcgcccttggtcataaagtaattcttgaggaagtagagcgtgttgccggagtcgaggatatcctcgatgacgacaatgtcgcggcccgtgatgtcctgctggaggtcgtgcgtgatctgcacgacgccggacgaggtcgtcgcgttctgataggacgagacggcgatgaattcaatgtcgctcttgagctggcaggcgcgtacgatgtcggccatgaagatgaaggagcccttcagcacgccgagaaacaggggatttttgtccttgaggcgctcgtagagctcgtcgcccatctcctgtacgcgcgttttgagctgctcctcggaatacagtaccttcaggatatcctgatccatattgctcttagccatagcttttttctccactttctttttattcgtatttgttgtatctgatgcggcgttccgccgcaggtcgcacaaattgacgttatctgggaatgatgcgcacgaagcacgctgcgtctccgccttccggcaggaaagtaacgtccgtccccagccgccacacggcggcgagctggccacccacgtaaagggcggggagcgcgtcgcgctcggtgagagagagctttcggtcgatgcacagacgtttcacgctgcgcgcgccgttcgcgccatcgagcgtcaggcgcgcgttcaagtcgcacggggcaacggtgatgacttcgctgtcttccggcgcgcggagcgaaatgccctcgccgtcgggcttatgcaacagcgtcagctcgaaattgccccatgggaggggaacgttttccacaagcgccgcttttggcagcgcggcgggggagaacgccatcgtcagcgaaccgtccgcgatgcggacagtcgcgccctgcggcagcgtatagcgccgctcggcgctgccgcctctctgtgcaagggcgcagatcgcgtcgagctgcttgcgcccgatgtccttgcgcccgaggccgagcgcgtcggccaagtgcagcaggatacgtggctgcacgacttcatcggcggcaagaaagcagtccagcgacagcgaaataccgccgtcctgtgctttcgcatgggaaagtgcggcttccgccgcgtgctcgagcgcatcgtcgagcacggtcaatgagcgcgccgtcgcggcgatatgctgaggcgcgcggggattgagctccctgagccgcggcagaatttcaagccgcaggtagttccgtgcggcggcgttcgggtccgcgttcgtatggtcttcgacatgcgggatgttgtgagcgtgcgcataggtgacaagctcttcacgcgtctgctctaaaaacgggcggacgatgtcgccctgcctgggccgcatgccgcacaagccgcgcagatctgtcccgcggacgaggttcaagagcaccgtttccgcattgtcatctaagtggtgcgccagcgcgatctgcgcgccgagcgacgttgccgtttcgcggagaaaggcgtagcgcaggtcgcgcccagcctcctcctcggttttgccggtcgcgcgcgcgtgggcgcgcacatcgccggtgcccggatagaaaggaatgccctctttttcgcaccacgcgcggacgaagttttcgtcgcgcaaggcctcctcgccgcgaagctggtggttgaagtgcgcgcaggaaacgtcatacccctccccgcgcagaaaatgcagtaaacacatcgagtccaaaccaccggacacggcggcgagcacgggctgctttttgtcgagatagcgcgcgcagagcgcttccgcgcgcggcagctcagtcctcttcatgccggtagtcgagcgacgagaacgtcgtatactgcggcgaccaggcgagctcgaccttgccggtttcgccgtggcggttcttggcgatgatgcactcggcgatgttgcgcttttccgagtcctcgttgtagtagtcatcgcgatacaggaacatgacgatatccgcgtcctgctcgatagcgcccgattcacgaaggtcggagagcatggggcgcttgtcctcgcgcttttcgttcgcacgcgagagctgggagaggcacagcacggggacttgcagctcctttgccatgatcttgagcatacgggaaatatcgctgaccacctgctggcggctctcgccgctgtagcccttcgtgccggaggacgccatcagctgcaagtagtcgatgacgacgagccctaaattgtcgatgcggcggcacttggcgttcatgtccgcaacggtgagcagcggattgtcgtcaatgagaatgtcaagccccgagaggacagatgcggcgtttgcgatgttgacccagtcctgctcgcgcaggttgcccgtcacgaggcgctggttctctaccgtcgcctgattcgataagatacgcgtcacgagctgctcgcgcgacatttcgagcgaaaacacggccacggcctgcccgctcgagcgcgcgacgttcagcgcaaggttgagcgccatactcgtcttacccataccgggacgcgcggccagcaacacaaggtccgatttgttgagaccattcatcttgtcgtccagtacgccaaagcccgtggggaggccgggcagcgttttgccgccgttagcgctcagctcgctcagatggtccagaacgccctgcaaaacaaccccgatgctcgccatgctctgcgcgctgcgcccgcggcgcacggcgtaaattttctgctccgccgcgtcgagcacgctggacgcgccgcctgtgccgtcctgcaccatggtggaaatttcccccgccacggtatagagcgcgcgcagcagcgccttgtcgcgtacgatgccgacgtattccatcacgttcgcgctcgtgggcgtcacgtccatcagttgggcgaggtacgggcgcgtcgtgctttcctcataggtgccgtttttctccatctcgcccgcgacggtcacgccgtcgatgggcttggagtagacgaacatggagtagatcgtctcgaagatctcgcggttctgctttaagtaaaaatcatcgggacggagctgctccatcacgtccttgacgcagtttgcgtcgatgagcatcgagccgagcaccgactgctcggcctcgagcgaatgaggcatctgccggtagaagatatcttccacgagaagacctccttattgcgtaatcttgcgccttactcctcgctcacactgacggagaacttggcgctcacttcgtagccgagcttggccttgacttcgtaggggccgaaagccttgatgggctcgtcgagcacgatcttctgcttgggcacgtcgagctggtactggctcgcaaggccctcggagatctccttgctcgtgatggcaccgaagagcttgccctctttgccgcccttggccgtgagcttgacggtcacatttttgagcttgccgcccatttcgacggcggcctgacggttcgcggcctcctcggcgcggcgggccttttccttcaggttcatggtgttgatggcgtcagccgtggcgagcacggcgagcttgcggggcagcaggaagtttcttgcatagccctcggctgcgtcgatgagctggccctttttgccctgacctctcacatcctgcgttaaaatgactttcatatctgtttcctccttgtggggtgatttacgttgtggggaagagcgtcactcttccatatattcgtcgatggcgttgagcagacgcgcccgcacctcgtcgacgctggcatcggccacctggccgccggcggtagtagagttgccgccgccgccgagtttttccatgatgaactgtacgttgatctcaccgagcgagcgcgcggacagattcacacccgtaccgtgcttgtaaagcacgaccgaagcgtggatgccggagagcgtcaaaagctcgtcggccgccttggcggcggtcacgcggtcgatctccttttcaaccgcggccacggcaatgtcgccgtgaacgagctcggcgtgacggatgatgtcatagcgctcgaccatgccggcaaggtcgctctggaagagccgctgtacgtccgacgtgtccgcgcccgcgcggcgcaggaacgcggcggcctcaaacgtgcgcccgccggtgcgcatcgtgaagttcttcgtgtcgagcacgatgcccgcgagcagtgcctcggactccgcgcgaagtaaatcggtcgggtcggcaagatactgcaaaagctccgtgacgagctcggatgcactggaggcgtagggctcgtggaagttgagcgcggcggattcgatataattcgcggctcttctgtggtggtcgatgaccgccacgcggttgcacgcatcaagcagctgctcggattcgacaaagtcggggcggttcgtgtccaccacgacgagcagcgcgcccggctgggcggagatgaacgcgtcgttgccggagataaaggcgtccttgtattccggaagagccgcaagcttactgagcagcggctttgcgacgttgtcttccatgtcgatgacgatctgcgcctttttgccgcgcttgcgcgcgatgcagcagatgccggccgctgcgccgaccacatccatgtccgcgtgcgcgtggcccatgacgaagatctggcctgcgtcggaaatgagctcgccgagggcgttggccatcacgcgggatttgaccttcgtgcgcttttcgggggacttggccttgccgccgtagaattcaaagtcaaggcggttgcgcacgacgacctggtcgccgccgcgcgagagcgccatttcgatcgagagcatggcgttctgatagagcgtttcgtagtcatccacatccttgcccacgccgatcgagagcgttgcggcgacgccgtcctcagtgacgacgcttcgcaccgcgtcgagcacggagaatttaccctcaagcagcttttgatactcctgctcggtcgtgacgagcacgtagcggttacgatcgaatttgcgcagcaggctgtgcgaatccttgagccatgtgctgatcttttcgtcgatggcggcgagcaccgcgctgcgcgacgcctcgctgccagccttcatcagctcttcgtagttgtcgatcacaatgaccgagacgatggggcggcggctctcgttctcctcgcgcagcgagtcctgctcggtcacgtccgtccagtatgttgtggcaagaaggctctgtccgccgcggcgggaggagggatggctcagattgccgaacacgcggaagtgacgcccgcccatcatcaccgtgtccgggcattcgcttttgccctcgagcagccagtgcgtcggaaaatcggggagaatgtcgtcgatgcggttgtcgaagatatcctcgcgcacgccggtgagctgcatgaagctgtcgttgctccataggatctcctgcgtgtcggggcggaagaccatcatcgcgaacggggccgagagcatcgaggccttgtcggcggtggtcatgtcgtcggtcacgtcgtcgatatactggcggataccctcgcggcgcttctgcgccgtgtggcggaagtaccaccagagaaacgccatcgccgcagcctcgcagatcgcgagcgggatgctcacgcgcaccgtgacggcggcaaagagaaagccgacaagaaagtagagccggaagctggggtctaccagtttgctgatctttttgttccgcataaagaagctgccctcccgttatgatcgatattactgcggcaaaccgcgggaataatccatttcattataacacggcggggcgggcggatacaatatcaatattttatttttcggcgtcgacaaaaaatgtggtatacttttggtggaaaacgtgctatactatccagcaatagcggatggccgcgcgggaaaaatgcgcgcaagagcctccgcggcaacgggttttgaccgcattttcgcggttctcatagaaagtccatagggatccaaaaggcgccgcaggtgcgatcgcttcgtgaagcagggcgaagtgagagcacggacgtctccaatgctttgcgctttttggtccggacgcacatgacaaaatcaaaacaaatctatcgttattctattgtgaaacgaatcaaaaggagttgaaccagcattggctgaacagttaaaaatcatccccctcggcggtctcaatgagatcggcaagaatatgaccgtttacgaatacggcggcgagatcatcgtggtcgactgcggcatggccttccccggcgacgacatgtacggcatcgactgcgtcatccccgacgtgagctatcttgtcaagcacaagaaccgcatccgcggcatgttcatcacccacgggcacgaggaccacatcggcgccgtgccctacatcctcaaaaaggtgaatattcccatctactgcacgaggctcaccgcgggcctcatccgcttaaagctcgaagagcacggccttctcaaatcgacgaagatcgtcacggtggaaagcggcatgaccgtcaaggccggcaagttcagcgtggagttcatccacgtgaaccactccatcgcggactctgtcgcgttcgccatccacacaggccttggcaccgttgtccacacgggcgacttcaagatcgactcgacgcccatcgacggcgaggtcatcgaccttgcccgcttcggcgagcttggcaagcagggcgttttggcgctgctcgcggattcgacgaacgtcgagcgcccgggctacacgatgagtgagcgcacggtgggcaggacctttaaccgcctgttccagggctgcaaacagcgcatcatcgtcacgacgttcgcctccaacgtccaccgtatccagcagatcatggacgccgcggcggagtgcgggcgcaaggtcgccgtcacgggccgcagcatggagaatgtgacaaaggtcgccatggatttaggctacatgaagccgccgaagaacaccgtcgtcgacatcaacaagatcaagtcgatgccgcttgaaaagcaggtcatcgtcaccaccggctcgcagggcgaggagatgtccgccctgtaccgcatggcgttctcccagcacaagcagatcgaggtcggccccggcgaccgcgtcatcatctcggcgagcgccatccccggcaacgagaacaccgtctcgcgcgtcatcaacgagctcttccgcaagggcgttgaggtcatctacgaccgcgcggacatgctgcacgtttcgggccacgcatgccaggaagagctcaagatcatccacgcgctgacaaagcctaagtatttcatccccgtgcacggcgagcagcgcatgctccagctgcataaggacctggccctccagatgggcatggaccgcaagaacatcgtcatctgcgacaatggcgacgccgtcgagattggcgcgcgctcgatgaagtgcgtgcccggctacgcgcccgcgggcgaggtgtttgtcgacggctacggcgtcggcgacgtcggcgcggtcgtgctgcgcgaccgcaagcatctggcggaggacggcatggtcgtcgtcgtgctgcccatctccgcgcagaacggcgaccttctggccgagccggagattatcacgcgcggctttatctacgtcaaggattccgaggagctgctgcaggacctcagaaacctcacgatgtccacggcggaggcctaccgcggcaagcgcgggcgcgacctgaacgaactcaagggcgcgatccgcagcgcggtgagcaactatctttttaaggcgacgaagagaagcccgatggttttaccggttatcacgaaactttaaaacaaaggagcggctttgccgctcctttgttttaattggggggttttatgcgcgcagcggcctgaaaagtgtaaattgtcacacacatggaaatcggcgaagcgccgccagtggcggatgaagcgagctggtttcgaggaagtggcacgattggcgcgcccgaaagggcgcgggagtcgtaatgccacgacggtgacgtcagaatttacgattcaaatttatttcgcgtctgcggacgcgaaagtctgcgacgcttttggccgcctgtgggcggcgggataagttattttggcagggaatgcggaagcattccctgcctttttgcgttgtggaaaaccgttggcaatggtagggagggcattccgttttttcagttgacggggagagagcaatatgatactttatcggtagacgatatatcggctaccgttataacgttggccgaggaaagaaggataccacatgggaacgacggcgctgaccgaagcggtcttttacattttgctttcgctggatacgccgctgcacggctacggcatcatgcagaacgtagggcatttgagcggcgggcgtgtgcagctcgccgcaggcacgctctacggcgcgctcgcgacgctgactgagcgcggctggatcgtgtcgctcggcgacgagagcgaggggcgcaaaaaggagtatcagatcacgcccgcgggccgcgaggccgtgcgcgcggagctgcgcagactgcacgagctgacgcaaaacggcgacgcgctgacaaacgaatggaactgagaggaggataacgatggaaaaggacacaaagcgggtctggcaccttccttattgttttttggaaccgggggaactggagcgcaaatttgcacgtctggcggcgcagggctggttgctggaaaagtgtacctatggcacttacacctatcgccgcggcgagccgaacgagtatgaataccgtgtgcagtacatctacgaatcgcgtgacggccagcgtaccgactatgtgaaaacgctcgcggacatgggcgtcgagaaggtcggcgatatgggttcattccttgtactgcgcaagagagcggacggtgcgccgtttacgctctattctgacctcgatgcgcagatcatggacgcgcggcgactgatgcggataaagatcattctggcggtcgcgtttgcgctgctagcggcggactggttctataacacgtgggtctggtatgatctggctgtcagctttgacgcgatgtatgccgacctaagagagacatatcaccagccaagttttttatcgctgcggctatggggaaagcacatcatctggtatgcggtgctgggcgtgctgggcaccgccgcggcggtaaggaccgcaatgcaggctgcccatgtggggaaaacgtatggagaattgaagcggaaacgcctgatcgaagagtgaaaggagaatcgccatggtcaaggacaagaaggtgctgccgcatttgtcgagctatgccattgatcccgagcggatcgaggagcaggcgaaccggatggcaaaagagggctggcttcttgaaaaattcggctcgctgttttccacctaccgccgcgggaaagcaggcgaatacgagtaccgcgtgcaggtgaaggaggcgggcatggaccgccttgtctacacggcggagcttgcggagtttggcattgaagaggtcggcggcgtgggagacctgctcgttctgcgcaaaaaggcggacggtgcgcccttcgagctgtactcagacctcgattcgcgcattgcccagcagaaaaaagccgtgcgctacctgcgcgcgggtctgatcatgagctttttctgggggagcagtatgctgatgaatgttctgacaacgctgatgaatgcaaacgtgatcggacggtacgcgggcgtggctgcgataaactttagtacggcgaaggtgctgatgcttgtggcggcctctcttcttctgcttgtctgcatcgtgggttttgtcgactgcccgcgcggcctgcaccgcgcgaaaaagaaaatcgcggcgctcgaagccgagcgcgtgattcaggagtgaaaggagagcagaaatggcagagacgatgacgaagaagtggaacagagcaccgcttgcccccgagcgggtggaggagatggagcgctatctcaacgagatgtcccacgagggctggcagtgctgcgagatcgtgcgcgatgagctgcactttgtgcgcggggagcaggacgaatacacctaccgcgtgcaatacttttacgaatcgcgcgacggcgagaaggacgactatctgcgcacgctcggcgagacgggcgcggcactggtgggcgagtacggcgaggcgctgatcctgcgcaaaaagacgtcggacggtgcgttcgagctgtactccgaccttgactccaagatcgcggcgctggaaaagcgacgctcacacgcaagaaacatgatgctcggcgcgctggtgctggtgctgctgagagggaactatgcgtacaaggcaatctcgcagtacggtttttcaaactggctggacacgcagcttgattcacctgtatatatggtgctgactattctgatcgtggcgggactgctggcgggcggtattgccagtatgatttccgtgcggcgcgaggggaaaaagatcgaagagctgaagcgcaggcgcatgatcgaggaataagcccccgcttgcaaatcccgcctatccgttgtagaatagccctgctatcaaacagacaagcgggaggaaagccgacatgatccaggatatcgagccgaagcatctttacaacgagtggaaaaagaacgccgtgccgaaaaagagcagcgtcgtggtgcagttccgcgggcaggaccttttgtgccgtatcgacgacaacggcctcaagttcccatcgcgtgcgcagtttaccgagtccgacgaggcgttcacctatctttttgaactcgacgggcgggagtattacctgctctttgacgaggaagagcgcacgctcgacggctattcctaccgcaatatcggcctcttccgcacggaaaagccgcaggagcttgcctacgccgccgtgagcgcgtggcatctgtgctcttggtatcgcagcgcgcgctattgcggccgctgcggggaaaagctcgtccacgacgtgaacgagcgcatgatgcgctgtcccaagtgcggcaacatgatcttcccgcgcatcaacccgtcggtcatcgtggcggtgacgcacggggactacctgcttttgaccaagtacgccaaccgtcccggcgcgcagcgcacggcgcttgtcgcgggcttcaccgagtttgctgagagctttgagcagaccgtgcagcgcgaggtgatggaggaggtcgggctcaaggtcaaggacctgcgctactatcgctgtcagccctggggcatcagcggcaacatcatgatgggcttctggtgcaggctcgacggcgacgacgatacgatccatctcgacaactttgagctggcggacggcgcgtgggtcagccggaaagaattgcaggagaccttcgtcaacaacggcatcgccctgacggcggagatgatctccgaattcgccgcgggcagagatccgtacagtctggaaaagaataaataaaaaagaaaagcggctgtctcgacagagacagccgcttttttcatatgaaaccgatcgacagcaggcgcatattgtcccactgcgcgagctcgcggagctctccgccgtcgtactcgtacagcgtgcacggatcccaccagttgacgttgagcttaacaaaggcaaagtagcgctggccgttcacgacgatgatctgaaaatcgaagatcgcatggtcgatctggtctgcggcagcgtgcatcatggcgatcatcgtttcgttggggtcaacgacattgccgacagaatcatagagcgtggtggcgacaagtgtgttgaccctgtgcgagcgaagtgcggaggtgtcaaagtctgcgtagtcggcggtgtaaaagacacaggcgtcgggcgtgaaggcgtcgcaggcgcggcttttgccgcttgcatagaccgtttcatagacgtaggcggcgtcctgctcgccggcgcctttcagcgcgacgtgcaggatcggctcgtcagacttatttcggacgaagaaaagcagcgcgagacacagtgcgaagctgagcagcgaggcaagtatgcgtttcatcgtaagcctccttgcactccggcgctcagaagagcgcggggacatagtcgaccgcgtcggtgatgccgcccgcctgaccggcgagcgacagctcgaagcggtagaccggctggtagaagcccttggaatcggagaggtagtcgagcgtgcaggagcgcacctcaatttgctggacgctttgcgcgaaccacgcgccctcaaagctcttgcccgattgcagcgcggcgagcgcctgcgcgggggagagaataggctcttcgcgcacgggcgcgagcgtggtgatgcggttttcgagctgcgagagcgtcgattgaccgtcgccttgtgttctcagatcacaagtgagcgtgccgtggaggaagcctccctccgtggggagaagatcggcggagaacaccgcacggtaagaggtctcgccatacggcgagagcgtgaacgcggcgtcggcagggacggaaaagccaaagttgtcgagcgtttcgcgcatcatgtcctctgtgacaccagacgcgggcgcatcgaaaacgggcgtgtgatcgcgcccaaagctgtattcccacgtgccgtcgtgcagggtaacgtcgaggaagtcgccggaagagtggttggcgtagatcacaaggtcatcgtagtagtacgcatccggaaattcgacgccgtgcgcggcggcgaattccgcggcgaaacgatcggcacccgcgttgtcgagcgcctgcgagcgatagacccaggcggtcttgctgtcctggtcgagcgcaaagtcgaccgaccagcggacgccgctcaggtccgccgtcgtgacggaggcgtcgcgcaggttgccgtagggctgcgcggcgtaggagataaaaatagcggatagcgcgagcgtgaacgcggcgggcagcgcgcagtagcgcggccacgctctgctcttttggcgcagtgcgagcacaaacatcgctgcacaccagccgagcatcgcgccgagcgtgttggtgaagaggtcgtccacgtcgcacatgccgcgcccggtgaaaagctgcgtcagctcaatgaggagcgagacgccgaagcccgcgcccagcgcggcgtaccatttgcgaaacggcttagcgagcagcggcagcagaaatcccagcgggatgaagagcgcgatgttgagcagcacgttgagccaaatttgcagcgtgaagcgctgatacgcctcgcgccaggcaaggaaaagctgcaaattccactgccgcgcggcaaattcattcggctcgctgcgcagcagcgtgacgaagaatgtgaccgccgcccagccgacgagcagcagcgcgcagaccgcctttccccacggaaagcggcggccctgcctgcggcagacggcgtagcaaacggccagaataagaccgcagacgagcgcggcgggcacggcaaagcgcatgccgcgctgcaaaagataaaaaagataggaaacaaagtcgtgcatgagctccctcccaatttgatttatcagttggtttcactgttcgcggttttgtcctcttcgatgcgcacgctcacgtcctgcttaaaactaagccacgcatcctcgttttccacatagtatttggggcagatcttacccgtcacgtcgtagtggcgaatgacgtccgcgtcggggtcgaggtcaaaggtctcgcagagccacgcgacgagcgcttcaaggctctccatcgtcgcatcgtcaaacttgcctgtgtcgtcggggtggcagacctcaatggacacggtgtagtcgttcgcggtgttcgagcagtaggcgatctccgtcagcggcacgcactgcaagatctcaccctccagcccgacgacaaagtgcgcgctcgcgtaggtctcgtgcgtcagggcgaggtttgcaaaaaagctgcggttattggcggcggtcgtgccgggattgccgacatagtgcaccaccacgccggaaatttccttgagcggcgtgccgggacgagagtattcgtttgtcggaatgtagtcgaccgtgacaaagtccggcacgctgacattcgaaccggggagattccggtgcgcgagcgcatagcgcagcttcacgccgccaagaacgagcaaaacgagcgcgagcaggacgaggaaggctttcttactcccggtgcggcggcgcctgcgccgccgctttgttctttctgccatgttagttcacgctttccgtggtggaagtgttttcttcggcggcagggaggtcgctgatgtcctcttccttcgcgttgtcgtagtaggcggggctcagctcgggcagcagctcattcagtacttgcagggtgttgggcgtcgagccattcacagggggactgagcgtatacacctccgggcggcctttttcattggtggactcatagtacagctcgagcgagaaggagatggaggaatcgtacaggtgctcctgcacggcgaagatgtcgctgccgccgttatcggaatcctgaacgtcctgcatcagcgcggcgtagacctgttcggcctgcgcggcggtgagggcatagtcctttccaccggcgttatcatcgtaatagtagcaatagctgtcgaggaaacgcggcgtgtcgccgaggtgctcgtagccgtagccgaggacgcggcaaagcacggactctctgcacatatagagcgcgttcacgcgcgctgtgacggacgagggcacggtgagctcgcttctccgcaggtagagcgaataggagcgcgagagctgcgagccgtccttgaggtagtaggtcaggcgcagggagaagggttcaatgtcgtcatagtcgctctgggagagcgtatccgcgtcccatgcgtctgcgatgcgcgcctgctcgttccggtttttgacgatggcccggtgtgccgcggtgaggcggcggatggtatcggcgtcgtcggtcgtgacgtttgtcatgccggagaaggtgtagaaggcggattcgatctcgctctcgtccggcacgtgcttttcatagcccgtgaggtcgaagctcattgcaacgccgagcagcacgagagcacccgcgacgatggctgcgccctttgcccccgcgcggaagacgcggaagctctttctgatgagcatctcggcgacaaagtagcccacaagccccgccgccaccatgcagaggatcgtgccgggcagggaatcgctgccgcccgagcggtactggccgaagaggaaatagtagagcagctgcccgagggcaacggcggtacagaacgccacgccgtacttgaagatgggcgtcgcccacgggaaggcgaccgtcgagccggtcatctcgctcttgcgcgtgcggtagaggagcagcgcgatgagggcgatgacaagccccgcgagcgcgtaggcggcgaggatcatgaaagagccgcgctcgagcgcgtaggcagtcacatagtacgagtcgctctcgcaggtctcgatcgaggcgatgcccaccttggtgtacatatagaggggcggggagaggaaaccgagcgcaacgtcggtgtgcccactgtagccgtagaggaaattgcccgcaaagttgcgcagcagatattccattcccgggacgaggatattgccgacgaaatagaagacgggcgcggcgaggatctgccccgtcatcatcatgcacagcacggcgaaggagtagaaaaagacggcttcgagcatggcgctgcccatggccgcagcagtgacgctccagaagcttaagtgcagcggggcagagaccgccgcgccgagcaggaacgtgacgagaatggtggaaagctggcagaacagtcccgtgaggtaggcggtcagaaagatggtctcgcgccgcacggggagcgcgtggaagccgtttgtcgcgcggctttgcgtcaggtgcgagaaggcgagcatcgcaaagaaaaggccgaaaacgaaggaaataaagacgccgccgcgcacgccggtgttgagcagcaggcgggacgcatccgctgcgctgtagccgccctgataggcggaaagctctgaaaagagcgcgaccggcacgaggaagagccacaaggcggtgtagccaagccagagcggccaggtgtgcttgagctggctgcggaataaagtcttatcaaagaacgatgtcgcggatcgcatagtcctcacctcccagttcatagatgaaaatttcttcaagtgacagcggcaccgcgtcgataaagatcgggtgcagcgcggcgagctgctgttccagttcctctgtgctgccgcggcagatgagcgtgtggacgcgcccggtctgcgcgtggtgcagcaccttgatctcctgtggcagctcgggcagctccgcgccctcgaaggcgagctggagcttgacggtatagtcctgcaattcgctcagcgaatgctcaagcaggagcttgccgcggctcatcacgcccacgtggtcgcacacgtcctccaattcgcgcaggttgtgcgaggagacgagcaccgtcgtgccgcgctcggcaacgtcctgcaaaatggggctccacacctgacggcgcatcacggggtcgaggccgtccaccggctcgtcgaggatgagatagtcgggcatcgtgcacagcgcgagccagaaggccgcctgcttctgctggcccttgctcatgcggcgcagcggccgcttttcatcgagcgcgaagacctcacggagcttttcaaagcgctcctgatcgaacttcgggtacagcccgcggtaaaagcgcatcatatcgcgcagccccgcctgcataaagtagaaccagtcgtcgggaatggaggcgatgcgcgccttcacgtccgcgttttcccagacgggctggccgtcaaaggtcacgctgccgctgtcctgatgataaacgcccgtcaagtggcgcagcagcgttgtcttgcccgcgccgttcggccccacaaggccgtagaccgcgccgcgcggcacgctcaggtctgcaccgtcaagcgcggcaaagccgtcaaaggtctttttaagaccgcgtacttcgatcatttcgcttctccctccctgcacaatgcttgaatgtcttcttcgctcacgcccatggcgcgcagctcctgcaaaagctctttgagctgatgctcaagcgataagcggcgcgcgtcgtcctgcgcgcggtaggtgtgcacggcaaagcagcccttgccgggcacggagcagcagtagccgctcgtttccagctcgttgtaggcgcgctggatggtattggggttgatggcgagctgcgtcgccagcgcgcgcaccgaggggagcttgtccccgtcggcgatcgcgcccgagacgatcagccgccgcagcccgtcgcacacctgctcgtagatcgggcgcgcgtcgcggtaatttaagatgatcatggcattcctcctgcattcatcggctgcacagcacggcgagcagcaaaatgccgagcagcagtacaacaagaaccgggatcagaaatatcaagtggaacataggcacctcctgctgtgttaagtgtgttagtacagttaggatagcatggcggacaccggctgtcaagcggggaatgcaaaaattttccaccgttttgctgtgcaaatcactaaatgcacgtaaagaatacattaaaacttatgcagaatgtatgatttgccatgcgcgcacgacaaaaaacgacacttgccccgttgacagcgggcggccgatttggtattctctgagatatgaaagaaattcatcaaacgttttacggaatgtgatttttaggaaggagaagtgtatggaacagtttatgaagatcaatactgcggtcaacggcttcgtctgggggccggtgatgctggcgctgctggtcggcacgggcatctacctgagcatcgctgtgggctttatccagttcaccaagatcggctactggtggaaaaacaccatcggaaagatctttaagaagggcgaggccggcgacggcgagatcacgccgctgcaggcagtgtccacggcccttgcctccaccgtcggcacgggcaacatcgcgggcgtcacgggcgcgatcattttaggcggccccggcgccgtgttctggatgtgggtgtcggcgcttttcggcatggtgaccaagttctctgaggtcacgctcgccgtcaaataccgcgagcgcaacgaaaagggcgactggtgcggcggacccatgtactacatcaaaaacggccttggccccaagtggaagtggctcggcaccgtgttcgccgtgctcggcgccatcgcggcgttcggcatcggcaacatcgcgcaggtcaactccatcgcggactccgtcaagtccgtcgccatcgcgttcaacgaggacgcggcgaataaggagatgctcatctgcctgatcaccggcatctgtgtcgccatcttcgtggcgctggtgctgctcggcggcgtcaagcgcatcggtcaggtcacggaaaagctcgtgcccggaatggccgttatttacatcgtctgcgcgctcgttgtcgtgtttgcgaatttgagcgccgttcccggcgtgttcgcttccatcttcaagggagcttttaaccccgctgccgtcaccggcggcgcggcgggtatttccatcaagcttgcgatgaccaagggcgtcggacgcggcgtcttctccaacgaggcgggcctcggctccgcgccgatcgcgcacgccgccacgtcggaaaagaaccccgtcaagcagggcctttacggcatcttcgaggtctttatggataccatcgtcatctgcacgcttaccgcgctcgtcgtcctctgctccggcgcggcggacggcaactacggcaacaacgcggctgcgggcgtttcgaccacggtcgcgggcttctcgagcgtcttcggcgcgaaggcgggctcggtcattctggcggtcggcctgctgctgtttgccacgtccaccatcctcggctgggcgctctatggcacgcgctgcgcggagttcctctttggcagcaagatcatccgcccctatcagatcatcttctgcctcgttgtcgtggccggtgcggtcgcggacctgacgctcgtgtgggatatctccgacacgctcaacggcctcatgtccatcccgaacctcatcgcgctgctgctgctgagccctgtggtgattaaactgacgcgggagcactttgcaggactgagaaaatgatcaaaaaacggtatgccgctttttgagtgagaacgaaacagcagcatatttgccgccgtgcgcggcgacaaatatgctgcgctgaaaaagcctcgcagagtttcacgtccgcagacgtgaaagctgtaaaatctgttttctgccgcgacatgcgcgccctccggaggggcttctcttgcccgctacggggcaattcaccttctggcagaaaacactttacgcggagcgagcgtcgaattgtccgctataagcggacaatcgaggcgcagaacgcagcgaatccttttcgaaaaagtggctttgccactttttcgacggtctcaaagagacggcctaggccgtctcttttttcttggttttgctgtgtgggacgggaaaaagcaaaaaagcggtatcatttcacaggttttgctttacaataggaaaaagctgtgctatcataattcagcacgcgtatcgtgcgcattcccgcacttaggacgtggaggattcaccgacccgccgctcagtgttgggagaatttaagaaaggtggatatcacactatgatgctcaaagaccagaagacggctatcatcgaagccaaccgcacccacgaaggcgacaccggttctccggaagtccaggtcgctatcctcaccgagcgcatcgctcagctcaccgagcacctcaagcagcacccgcaggacaaccactcccgccgcggcctgtacaagatgatcggtaagcgccgcagcctgctcgactacctcatgaagaaggacatcgagcgctatcgtaccctgatcgccaagctgggtatccgtaagtaagtttgaaaacagggtggtgtgcatgcgcaccacccttctttcacactttcgccctgggcacttcccccgcgcgtatgagagcctgctatgctttagcagttgaaaaagcggcggcgcggccgacgttttttcaagtgctaaacggtcggctcccatacggaattttacaaaaaaggagatcgacaaatgtctaccatcatcacccacaggcagttccccaactaccacaagtacgagatggagctcgcaggccgtcccctcactcttgaggtcggcaagctcgccgagctcgccaacgccgccgtcatggtcggctacggcgacacccgcgtgcttgtctgcgccacggcttccgcccgcccgcgcgacggcatcgacttctttcccctctccgttgactttgaggagaagctctactccgtcggccgcatccccggttctttcaaccgccgcgagggccgtcccggcgaaaagggcatcctgaccagccgcgtcatcgaccgccccatccgcccgctcttcccctccgacttccgcaacgacgtctccatcatggcgacggtcatgagcgtcgaccatgactgctctcccgagatcgcggccctgatcggtacctccgccgcgctcgccatctccgatatcccctggaacggccctgtcggcgcgctcaaggtcggccttgtgaacggcgaactcgtgctcaaccccaactccgagcagcgcaaggtcagcgatcttgacgtcacggtcgtctcgaccggcaagaaggtcgtcatgatcgaggccggcgcgaacgaggtcgacaacgacaccatgtacaaggccatcgagcttgcccacaacgagaaccagaagcaggtcgagctcatcaaccgcatggtcgccgagatcggcaagcccaagttcgactacccgcacgcgagcttcaaccaggagttgttcgacaagatcgtcgaaaacttcatggacgaggccaaggccgcgatggacaccgacgacaagaacgtccgcgaggcccgctggaacgagatgatcgagcactggcacgagaagttcctcgaggagtatcccgatatggatcagttcctcgacgagatcacctacaagttccagaagaagatcgtcaaggcatggctgctcgaaggccaccgcgtcgacggccgccagaagaacgagatccgtcctctcgctgccgaagttggcgtcctgccccgcgtccacggctcgggcctgttcacccgcggccagacgcaggtgctctccgtttgtacgcttgacacgctttccgccgcccagaagctcgacaccatctgggaagagaccgaaaagcgctatatgcaccactataacttccccggctactccgtcggcgaggccaagccctcccgcagccccggccgccgcgagatcggccatggcgctctcgctgagcgcgcgctgctgccggtcatcccgtccgtcgacgagttcccgtatgccattcgcgtcgtgagcgaggtcgtctcctccaacggctcgacctctcagggctccatctgcggctccacgctcgcgctgatggacgcaggcgtgcccatcaaggcacccgtcgccggtatctcctgcggcctcattcaggacggcgacgacttcaccacgttcatcgacattcagggcgttgaggacttccacggcgaaatggacttcaaggtcgccggtaccaagaagggcatcaccgccatccagatggacctcaagaacgacggcctgacgatggccatcatcaagaacgcccttgagatcacctatgacgcgcgcgtgcagatcctcgaccagatcatgctgccctgcatctccgagccgcgcgccgaggtcagccagtatgcgcccaagatgatcaccatgcacatcgaccccgagcgcatccgcgaggtcatcggcaagggcggcagcgtcatccagaagatcgttgccgataccggcgccaaggtcgacatcgacgacgacggcaccatccacatcgcctccgccaacgccgccgcgtgcgacgctgcgaagaagtgcatcgacgatatcgtcttcgtgcccgaggtcggcaagctctactatggccgcgtcgtgcgcctgatgcagttcggcgcgttcgtcgagatcgccccgggcaaggacggcctcgtccacatctccaagctcgaccgcaagcgcgtcgagaaggtcgaggatgtcgtcaccgtcggcgatatgatctgggtcaagttcatggagatcgacgaaaagggccgctggaacctctcccgcaaggacgccctcatcgagatcgaagctcagcaggccgccgcaaaggccgccgaacagcagtgagcggtttctcccaaaagcaaacagaaagcagcgccgaaaggcgctgcttttttgcgcttgcagcgaaatcggcagcatggtatgctggatgtggaaaagttgaaagcgttacggggaggaaacttgccctatgagaagcgatagtatgtttgtcgaggcggccaaagaggatgtgccggagatcattgccctgcggcatcaaatttggggcactacttacagagggatctaccccgatgatatgatcgacaactttgattgggcgtggcatcaggagaaagaactgctgcggatcaataatccggcgtattctgtgtatctgctccaaaaagacgatcaaaatatcggttatctgacgatgagcagaacagatggagtcatcttgcaatccttgtatattctctctgaatatcagcggcaggggatcggtcgggcggcatttgattttatcaaggcgtattgtagggaacacggggcgaagttttttacctgccactgtgttcccgagaatctgaatgcccgagcattctatgagaagatgggcggcgaggtgatcaggacggacttggcaaacgaggagccatggcagaactcggtcacctatcggtttgcggcggcgtaagcgaatctgaaagatcgacagctgtcgggctgagaagtaaggggcggcgcccgcagggcgtggagaatttatgaaatatccgggaggttctttcaatggactatatccgaatcaccgatgagaatattgagaaggagcacatctgctgtgcgatgtccggcaagcagggcgtcatcaaaaaagagtggctcaagcagcgctttaaagaagggctggtcttctgccgaagcacggagcgcggcaagtgcttcattgagtatattccggcagaaaacgcgtgggtccctattcaggcggacgggtatttttatattgactgcctgtgggtctccggctctatgaaaggacacggatattccgacgatctgctgggagagtgcatccgggacgcaaaggagcagggacgaagggggctgtgcattctctcgtccgagggccgaaagcgggagtttctctccgacccgaagtatctggcatataagggatttgccgttgccgacacgtcggaatgcgggatcaacttgatgtatctgccgcttgcacaggatgcagagccgccgagattcaaggcctgtgccaagcaccctgcggtggaagagagaggctttgtcctctattataccgaccagtgcccgtttacttactactgggtgccgcgcgtggaagaggctgcgagagcgtaccgcgtgccattgaaggtcattcatattactgacagggagcaggcgcagagcgtgcccgctccggtgacgacctacgcgctgttcaaggacagcaaattcctgactcaaagcattcaaacggacaaaaaatttctgaagcttgcgggaatacaggtggagcagtgctcggatacaaaataaaagcacggtaaggggcgcggcatggccgcgcccctttgcaaattccatgcggctatgctgaagcggaagataaaataaatttcgcggcatatttacaggctgtgggggaatttggtataatatggcatccggcaggatacaaaagacaaaaacgtgattttcttccctgaaaggagaagtgctgtaatgcgtgattatatcattatgaccgatagctgttgcgatctgagccagcaggaggtcgaagagctcgagttgaccgttctgcccctctcatttaccatcgagggcaaaacgcttttgaatacgcccgaccacgcggacatgtcgcccgaggaatttttcgccaagatcgccgcgggcgcggactgcacgacctccgcggtcaacgtcggccagttcaccgacgcgatggaaaaggtcttgcaggagggtaaggacatcctctgcgtctgcttttcgagcgcgctgtccacaacgtatcagtccgcctgcatcgcggcggaagacctgcgcgaaaagtaccccgaggcgaagatcttagtcattgactcgctgtccgcctcgcgcgggcagggcatgctgctctatcgcgccgtgcgcgagcgccgcgagaagaatttgaccatcgacgagctggatgcctacgtccgctccatcatccagagccagtgccactggttcatcgtcgacgatctgaaccacttaaagcgcggcggccgcgtgagctccacggcggcgctggtcggcacgatgctcggcatcaagcccgtcatgcacaccgacagcgagggccgcttgacccccgtgagcaaggcccgtggcacgaaggcggcgctgcgcgcacttgtcgacaaggttggcgagatcggcgtcgagccggagaaaaaccagcccatgctcatctgccacgccaactgcccggagtctgtcgagtacgtcaaggggctactcaaggagcgcttcggcgtgacggacgtgcgcgatgagttcatcggccccgtcatcggcgcgcacaccggctgcggtacgttgggcctgttctttgtggggactgagcgatgaagtggctggaattacaccttgacacgcagcccgcgggcatcgaacccgcgacggagcttttgagcgagtacggcatcgacagcctgatgatcgacgaggagggcgacttcaaggacttcctcgaaaataaccaccagtactgggactatgtcgacgacgagctgatggagcagatgcacggcaagagccgcatcacgttttatttggaggacagcgccgagggctacaacaccctcgcgcagttccgtatcggtctgtcggccttcaaaaagcagcatcccgagtacgcgccgctgatcctcagcatggaaaatgtcgaagacgcggactgggagaataactggaagcagttctacaagcccatggagatcggcgagcggctgctcgtcgtgccggaatgggagcaggcgcaggaggacgggcgcgtcaagctcgtcttaaatcccggattgacgttcggcaccggcagccacgccacgacgcggctgtgcttacaggcgcttgagcagcatatccacggcggggaaaaggttttagaccttggctgcggcagcggcattttatccatcgccgcgctgctgctcggcgcgaaggacgcctttgcctgcgatatcgacgacaagtgcgttggcgtcgcgtatgaaaacgccgcactcaacggcgtcggcaaggagcattacaccgtccgcgcaggcgatgtgctcagcgacaaaaggctccagaaggagttcggcggcgactatgacgtgatcgttgcgaacatcgtcgcggacgtcatcatcgcgctcgccccgcaggtggggaagctcctcaaaaagggcggcattttcctctgctccggcatcatcgatgatcgtgccgatgaggtgcgcgagaagctcgtcgaagcaggctggacgatcgaagaaactcgcagcagcgaggggtggttttcttatctttgcagataagaggaggcttttcacgctgcgcgtggagggggaatagcagtgccgatggcactgcacggataaagggggccattctctcacgtgagagaatggcccccttacacccccaagagaacgcaaggggctctgccccttgaccccgccattgcaagcttggggcttgaagagctgaggtgcttgccgaatcgggtgcctgccaagtggtgctgctaaacgatttgggttgctcctattacccgctgccgctctgcctgcgattcgacagtctaacgcaatttccggctacttcagatttgtgcaaacctgcttttgcctgccgaggcagcattgctgtgctcgccgcgggttagttggcggattccatgtagatttcttcggctttctgctgagcggtggtgagcaggtcttttgcgctgccaaggttttgcttttccatttgttccagtgcgtcggtgatggcgttgaacagcagatggtacatcttttcatagttcatagtatagtcctcctatcgcaatacaagtgtaatacttttatattacacatatttggacaaaaatgcaatacacttgtcatatgaaatgtattgcaggtgagactatggcttttaaaattccaagcgtaccgccgacgaccaacaaatcggtgcgttttccaaatgatatgctcgaagagatcgagaacgcgatccgcggcaaggactgcacattctcggcattcgtcgtcgcagctgtccgagctgcacttgacgacttaaaagaacaagaaaacgaccgctgatgcggtcatttctttgtatgcggcgagcgcagcaatgccgcgcccgcaggcagtttgccgccgtgctgccgtcacacgcgcctcacgatagtaaggcgcggttgcaaccggtaacggctcgcagggactcatggcgaagccatgtacaccgcacctgattgcgcagcgcgtgcagctcttcaagcccaaaactgccaatgtgcggggtcgagggggaaggcccctcgtcctttctctcgggggttgcaaagggggatactctctttcgagaaagagagtatcccccttttacgcactcccgcacggtacggggatcgtcctcctgcaccagtgcaggaaaaaagctcttttacgcctccggcgtaagaacgcccttctctgtaaccagcatcgtgcagcgcatatcatgctcctcgaccggcgcctcgggcgacatgagctgctcgcggcagatgagcaccgtcgggcagtggagctgcggcagcaggcggtcatagtacccgccgccctggccgagacggcggcccttgcggtcgaacgacaggcagggcacgacggcgaagtcgatgtccgccgcggtgacgagcgcgcagttcttcttcggctctaaaatgccgtaggcgcccgcctccaggtcgtccatcgagcgcacgacgcacagatcgatggcgtgctcggcggcgcagcggggcaggatcagcgtcttgcccgcggcgatggtctcgttcataaagagcgaggtgtcgatctccttttcggtgccggcaaaggcaaagacaatctttgcgctcttgtactcgtcgagtgcgagcaggtggcggcagatggcctcggagctctcggccttataggtgggatcgagcgtacgctctttcttgcggataaaggttctcagtgcttttttctcttcgatcacagacatgggaaggaccctcctgatgctttcaaaatttgacagcaatatcgtagcaaaaagcgcggcaaaaggcaagctgccgaagaaagtaaaataatatcccgccgcgcttgtcaaaagaaattgacagcaatttttaattttgttatcctaatcatggataggaacgcggatgaccgcgtcgatcagaggaggaatttttaccatggctatgctgctcaagggagccgaggtcgccaaggcgctgaccgaggagctccatgcaaagacggaagaactgaagaaaaacggcgtagagccctgcctcgccatcctgcgcgtcggtgcacgcgaggatgacctggcctacgagcgcggcgcgctcaagcgctgcgaaaaggtcggcgtcgccgtccgtcaggtcgtcctgcctgaggatgtgacgcaggaggtgctgatggagaacattcacgcgctgaacgcggacaagaaggtccacggcgtgctgatgttccgcccgctgcccaagcatctcgacgatgaggcggcgcgcgcggcgctcgacccgaaaaaggatatggacggcatcaccgacggctccatgaccgccgtgtacgccggcaccaagggcggttatcccccctgcaccgccgcggcctgcgtggcgctgctcaagcactataacatccccatcaagggcaagcgcgtcgtcgtcatcggccgcagccttgtcatcggcaagccggtctctctgctgctgctcgccgagcacgcgaccgtgaccatctgccacagccgcagcgagaacctgcccaagatctgccgcgaggccgatatcctcgtcgtcgccgccggtaaggccggtatggtcggcgcggagagcgtgcgcgccggtcaggtcgtgctggatgtcggcatccacgtcggcgcggacggcaacctctgcggcgacacccgctttgccgaagttgagccggtcgtcgaggccatcaccccggtccccggcggcgtcggcaccgtgacgagcacgatcctcgcaagccatgtcgtcgaggcggcggagcgcgcggcgaaccagtaattttcgcaattcaacccaaatagaagagaaaggaaaccagcggacaagagaacaggagggaagtcatgggactttacgattccgttgaccgcggcaagccaaagcccaagcgtttgaccggccccatcgcgctctgctgcgcgctgtttctgctctttggcggtctgacatactgggcctgtcactaccagttccgcttccacgcgtttatttccgacttaacggacagcacgcgcgatgcgcgaagcacagagacgtttcgcgtcacagtgaacggaagcgaaacggacgtatcgatcgacgatctcagtgaccttttataccttatcgacaaggccggcgcgggccgcaccgccgctgcgccggaggaggtgccctacgccgtgatcgactacggcgacggctcgacgcttgagatctggaaggtcgagctcgcgaatccgtccaacgactggacggaggggccgtttttccgctacacggacgcgaaggggaagtcgtatggctacgacacggaccagattcgctgggaaagtgtcgttcggctcctgggagagtgaagaaagggagcacccgcaggggtgctcctttttttacgcgctctccagcgcgcggagattttgcagcccgaaagggctgcttctgtccctgcaccgtgcagggggcgagtcaaaggggccattctctttcgcaaaagagaatggcccctttggaaccccaagagaaaggcttagattggcagtctcgagctcgaatgacttttgtgcctccggagtggaagtgcgtgcgtggcggcattgcttcgctcgccgccaatggttctgcaagacgatttgcctctgctcctatcatccgctgttgcgcagccgttggcggctctgctgccttacggatgcggcacaccccttgcgggtgccgctctgcctatcttgtaggagtgcagcctaatttccgtttaccgccagtctccacaatgcggcgagcgcagcaatgccgctatttcgcacgcagtctgccgccatgctaccgtcactcacgcctcacgatagtaaggtgcggttgatagttgtaacgattcgcagggattcatggcgaagccatgtacaccgcacccgcactgcgcagcgcgtgcagtccttcaagctgcaaactgccaatgtgcggggtcaaggggcaggccccttgcgttctcttggggggataagggggatattctctcacgtgagagaatatcccccttatcccgtgcagcgcctacggcgctgccttccccgcggcaccagtgccgcaaatccctcgcacccgtgcgaacaagggggggatgttcagaaaaagaaaatctccctcttgacaatatcgatattcgataatatactctcctcaagaatatcgaatatcgataaaaggggggccgacaatggcgcgggagaaattcagcacgctgaccgagcagatgttttatatcctgctgtgcctgcgcgaggagtgctgcggcatggacgtgatggcgcgcgtgaacgagttgacgagcgggcgtgtggctgtcggcccggggacgctctacaacctgctcgagcagtttctggcggcggggtacatcgtcgagacgcgcgcggaggggcggcggcgcagctatcagctcacagcggagggtgaaacgctgctgcaaaacgaggtggagcgtctgcaggcgcaggtgcgggactacgagaagctatttgagagataacgccccttgcgggcggcgagaaatgagagaaagcgagggatagcgatgctaaaaacaaaatatgagtacaatttctattcgttttacgaccatacgggcatggagcagcacttcgagaaaatggcggcgcagggctggctcattgaaaagctcggctatttctggcgctaccggcgcattgagccgcaggcgctgcttttttctgttgtttactactccgaggcctcggaattcgacccgacgaagccgagcgagggcgagctgacgttctatgatttctgtgcgcaggcggggtggaacaaggctgcaagccgcgcacagatgaacgttttctacaacgaagacgtaaacgctgtgcccatcgagacggacgcggcgcttcaggtggaaacgctgcaccagtcgatgaaaaaggaacagctcatcgcctggtttttgatgctggcgctcgcgctgtggatattttttgacatgcgtaagagctttatcagggatttcgcggcggcgctttcccgcttaagcgcgctctcggccattttggattctgtgctcctgttcctgctgtgtgcgttggagcttggtggctactacctctggcggcgcaaggcgaagcgcgaagccgagcttggaagattcctgccgacgcgctcacatcctgtgttacagatgctggcgctcttggcgctggtgatgggctgtgccgttgttttgtacagtgacaaggaaggacgggggacttaccttgccatccttacgggtattgtattgctggacgcattgatttggggaatcaaggggctgctcaagcgtcgcggcggcagcgcagagctaaacaggggtatcacgctggtatcggtgctgatcctctcgttcattttttcgtttacctacttgcgcagcgtcagaaacggacaattcgaccagacgcccgaaaacgccacgcgctacgaggtcacgtggtccaatggcgagacatcgttttactacgcctacgatgatccgctgccgctctatgtgcaggatctgaccaaaacagactatgaccgctattcctgcgagctggcggaggaatcctcgccgctggcatctcaggtccgcggtgcgcagaggatgcgcacgggcgatgaggacgacgcgccggagctgaactacgaggtcaccgacgtgaaatttgcgccgctgttcgacgcctgtctggacggcgagctgaaatactaccagaactacacggtgaccttttaccgcacgcatcgccccttccggaactgggaataccgcgaggtggacgccgcaccgtggggcgcggaccgcgcgtggcaggccttcgataccgaaagcgacggctggggcgtctcgtgggtcttaacgcgcggcaagcgcatcgtgcgcataggtggcagcgcattgaccggcacactgagtcaggcgcagatggatacgatcagcgaaaagctgctgaatgcagacataaaataacgcaaaaaaggagcatccgaaaggatgctcctttttcataccgtagaagcagcaattactgcttgtcgtacaggtcgatgagcttggtgaggtgctcgtaacgctccttggccgcgtcctcgttgcgggtgaagagaccctccgcacgctcggggaactcgcgggtcaggcggctgtaacgcgcctcgttcatcaggaattcacggtaaccgccggcaggagccttggagtcgagcgtgaacttcttgtcagccgcgggattgaagcggaacaggttccagtagccgcactcgacagccttcttcatttccttctggcagttgatcatgccgcccttgatggagtgcatctcgcaggggctatagccgatgatcagggacgggccgttgtaagcctcagcctcggtgatggccttgatggtctgggccgggttggcgcccatggcgatctgcgcgacgtagatgtagccgtagctcatcgcgatctcagcaaggctcttcttcttggtttccttaccggcagccgcgaactgagcgacctgaccgatgttggaagccttggaagcctgaccgccggtgttggagtagacctcggtatcgaagacgaagacgttgacgttcttgttctgagcaagcacgtggtccacgccgccgaagccgatatcgtaagcccaaccgtcgccgccgaagatccaaacggacttcttggagaggtaatccttcttgtcgaggatctcagcaacgagcttgcaggcatcgcagtcgcagaacttctcgcccttggccttgagctcggcggcgtgctcagcgagcttgggcacagcggccagctcgtcgacagtggcgatgttcgcctgcagagctgcgacgtattccttcgtggcctcggcgttggcgttgccgtcgtccttggtgttgagccacttctgagcggcttccttcagtgcgggctgggtccactcgatggcaaggagctgctcggtcttggccatcagatcctcgcggatcttttcctggccgacatacataccgaagccgtgctcggcgttgtcctcgaacagggagttgcaccaagccgggccgtggccgttcttatccgtgcagtacggggaggtagcaccggggccgccccaaatggacgagcagccggtggcgttggagatgtacatacggtcgccgaagagctgagtgacgagacgggcatagctggtctcggcgcagcctgcgcaggagccggagaactcgagcatgggctgcttgaactggctgcccttgacagtgagatcctgcatgtccttcttgtcggagaccttggagacgcagtagttgaaggtatcctgctggggcagctcgccctcctgagagaccatcgtcagcgcgccgaccgggcactgaccgacgcagacgccgcagcccatacagtcgagcggggagatggccatggtgtacttgtaaacgcccttgcccttaccggccttgatgtcgacgatcttggcgctctcgggagcgttcttggcctcttcctcggtgagagcgaagggacggatggtggcgtgcgggcagacataagcgcagttgttgcactgaatgcacttcgtctcgtcccacgtgggaacggaaacggcaacgccgcgcttttcgtaagcggcagcgccgagctcccactggccgtccacatgaggcatgaaggcggaaacgggcaggctgtcgccgtccatcttgtccacgggatcgaggatgttcttgacctgctcgacgagctcgggcttgccctcgtaggagacggcctcgtcagcgtcgacagcgttcgcccaatcggcgggaacgtcgatcttggtgtaggcggtggcgccgaggtcgatggccttgtggttcatatcgacgacatcctggcccttcttcaggtaggagtgcgtcgcggcgtccttcatgtactggatggcctgctcctcgggcatgaccttcgcgagggagaagaacgcggactggaggatggtgttgttgcgcttgcccatgccgatcttgatggcaaggtcgatggcgttgatggtgtagagctggatgttgttcttggcgatgtagcgcttggcatccgccttgaggtggtggttcagctcatcgaagtcccactggcagttgatcatgaacacgccgccgggcttgacgtcgttgaccatcttgaagcccttggtgatgtagctggggttgtggcaggcgacgaagtcggccttgttgatgtagtaggggctgcggatgggcttgtcgccgaagcgcaggtgggagatcgtcacgccgccggtcttcttggagtcgtactggaagtaggcctggacgtacttgtcggtgtggtcgccgatgatcttgatggagttcttgttcgcgccgacggtaccgtcgccgccgagaccccagaacttgcactcgatggtgccctcggctgcggtgttcgggcagttcttgtcttcgggcagggagaggttcgtcacgtcatcgacgatgccgatggtgaactgacgcttgggctccgccttggcaagctcagtgtaaacagcgaacacggaagcgggcggggtgtccttggagccgagaccgtaacggccgccgatgacggtcttgtcggtgatgccggcgttggccagcgcggtgacgacgtcgagatagaggggctcaccctgtgcgccgggctccttggtgcggtcgaggaccgcgatcttcttggcggtggcggggatggcctcgatcaggcgctcagccttgaacgggcggtacagacggaccttgatgagaccgaccttctcgccgtgggcgttgaggtagtcgatgacttcctcggccacgtcgcagatggaacccatcgcgatgatgacgcggtcagcgtcgggtgcgccgtagtagttgaagagcttgtagtcggtgccgagcttctcgttgatcttgcccatgtacttttccacgacttcggggagagcgtcgtagtactggttgcaggcctcgcggtgctggaagaacgtatcaccgttctcatgggagccgcgcatggcgggatgctcggggttgagggcgtgctcgcggaacgccttgacagcgtccatgtcgcacatgtcggcgagatccttgtaatcccacacggcgatcttctggatctcgtgggaggtgcggaaaccgtcgaagaagttgatgaacgggaccttgccggaaagtgcggccaggtgtgccacgggggagagatccatcacttcctgcacgttgccctcgcacagcatggcaaaaccggtctggcggcaggccatgacgtcggagtgatcgccgaagatgttcagcgcgtgggtcgaaacagtacgggcggagacgtggaacacgcaggggagctgctcagccgcgatcttgtacatgttcgggatcatcagcagcaggccctgagaggccgtgtaggtggtggtcagagcaccggcaccgagggagccgtgcactgcgccggcagcaccggcttcggactgcatctcgacgaccttgacctggctgccgaagatgtttttcaggccatttgcagaccactggtcgaccaggtcggccatcggggaggacggcgtaatgggataaattgccgcaacttcactgaaagcatagcttacgtgagccgcagcattattgccgtccatggatttcatttttcttgccataaatgaacctcctatttatttcaccgtcaaaaaacggttcttctgcgtgtgaacgcaaaattcaacgatgacactatagcacacttttttcgctatgtaaacgccttgttcccgcaaaaacattcactattttgcaacaataggttcaattccttttatttttcgagaacttttgcgaggatttattgattttgtgcaaaatgtgcaaaaatgcgcggagggggatttgcctgatgcaaaaaatgtgctatactaattgcaaactgtacgattcgatgcgaaagagggaggaaaacagtatggtcacagcggtgcgctcgctcggccttcagggcatctcgggctacgaggtcacggtggaatgctttttatccgggggcctgcccgcatttgatatcgtcggccttggcgacacggccgtcaaggaatcgcgcgagcgcgtgcgcgcggcggtgaaaaactgcggcgtcaagttccccgtctcccgcatcacggtgaaccttgcccccgcgggacggaaaaaggagggcacgctctatgacctgcccatcctgctcggcatccttgccagtgcagaggagatcaagcctcccgcgaaggacgcggcctttgtcggcgagctctcgctgaccggcacgcttcgcgcggtgaacggcgttttgccgatggcgatggccgcggtgcgcgcgggcatcaggacgctctacgtccccgcggcgaacgcagcggaggcgacgcttgccgacggcgtgaccgtttacggcgtgccggacgtcgtgtcgctcgtgcagcatttgaagggtgaaaagaagctctcgccccagccgaagtggcaggcggagcagacgagcgagaccggccccgacttttccgacgtcatgggacaggaaaatgtcaagcgcgcgctggagatcgccgctgcgggcggacacaatatcctgctcatcggctcgcccggcgcgggcaaatccatgctggcgcggcggcttccgtcgatcctgcccgacatgacgcgaaaggaagcacttgaagcgaccgagatctggtcagtcgcgggattgaccgacagctcgcacccgatgctgctgcaccgcccgttccgcgcgccgcaccacacgctctccgcttccgcgatgaccggcggtgggcagacgcccaagcccggcgaaatttcgctcgcgcaccacggcgtgctttttttagatgagctccccgaattccaccgcgacgtgctcgaagtgctgcgcgcgcccatcgaggacggcgaggtcaccatcacccgcgccgcgggcagtatcacgctgccgagccgcttcatgctcgtcggcgcgatgaacccctgccgctgcggctggtacggccacccctcggggcgctgccactgcaccaagcagcaggtggaaaaatacgtcgaaaaaatctccggcccgatgctcgaccgcatggacttacacgtcaacgtgccgagcgtcgagttcgaagccatgcgccggcgcgaaaaggcggagtcctccgccgacgtcaaagcgcgcgtgaacgccgcgcgcgacatccagaagcagcgcttttccggcacgaatatcacctgcaacgcgcaaatgacgcccgcgatggtgggcgagttctgcacgctggacgccgcgggcgaaaagctgctcaaaggcgcgttcgagcgcctcggcctcacggcgcgaagccacgatagattactgcgcgttgcgcgcacgatcgccgacctcgacggcagcgagaagatcgaggcgcatcatctggccgaggccatccagtaccgcaacacggatattttacaggggtgaatgagatgaaaaggtatgactacatccagtttggcgcgctttccattttgagccatatcgcccaaggggcggcttttatcctgttgttcgcggcgtttggaggcacggggtcgacctcgtcctttacgtttgccacgcccgtcgggctcgcgctcggcgtcgtctatgtgtcggcgctttctttcctgttcggctggggcctgcggccggagcggggcatcaacaaaaattgctgctggaatgcggcgatcgtgctctatgtgctgaatcttgcctcgcttcttgtgatgcctgtcccgttcggctcggggagcatccttgcgatgatctgggagctgccgatggcgcccgccatggtcgggatcaacggggtgagcggagagggcacgatgttcagctatgcgctctttgccctgctggccgccgttgagccgctgtgctttacactggggctcacccgcaaagggaaaaagcctgccaaatccgaaaccaacgaaaattcagccgtatcttccgccggcgcgggggcggccataataaatgaggagaacaacaccaatgcatgaaatgatcctgtgcaagctcggcgaggtcgtgctcaagggcctgaaccgccgcagcttcgaagataagctgatgtcgaacgtcaaccgccgcgtgtcgaaatgcggcaatttccgcgtctactccaagcagagcaccatctacgtcgagccgaaggacgacgagtgcgacatcgaggccgcgtttgagagctgcaagaaggtcttcggcatcattgccgtttcgaaggcgctgccgtgcgaaaaggacgtccagaagatcatcgccgcggcgaaaaattaccttgcgtgcgagatgcgcacggccaggagcttcaaggtcgagagtaagcgcgctgacaagaccttccccttgacgtccatccagatttcccagcaggtcggcggcgcgctgcatcaggcgttcccgacgtgcgaggtcaacgtccacgaccccgaactcgtcgtccacattgaaattcgcgacgattcggcctacgtccacggccccgcggaagagggcgcgggcggtctgcccatcggcatgggcggcgtggcggtgagcctgctctccggcggcatcgactcgcccgtttcgtcctacatgatcgccaagcgcggcgtcaagctcgaaatggtgcactttttctccccgccatacacctccgacgcggcgaaggagaaggtgctttcccttgccaagctcttagtcccctggtgcgggcggctgacggtgcagatcgtgccgtttaccgagatccaggaggagatcagaagaaactgccccgaggagttcttcacgctcatcatgcgccgctttatgatgcgcatttctcagcgcgtggcggaacaggtgaaggccaaggcgctcgtcacgggcgagaacctcggtcaggtcgcgtctcagacgatggaggccctgcgcgtgaccgaggacgtggtcgacctgcccgtcctgcgcccgctcatcggcatggataaggaagagatcgtgcgactgtcgagaaaaatcggcacatttgacacatcaatcttaccctacgaggattgctgcacggtcttcaccccgcgccatccgcgcacgaagccgaacctcgacgaggtccgcgaggccgaggctgtccttgatatcgagggccttatcgaccgcgcgatgacaaaccgtgaatttgtgcgcatcaagttctgaaaggaagtcttattatggcggaaaaaacagtcgaacagcgctgttatgaagcgctcaaggcgcgcggcgtgaccttcgccgcggcggagagctgcaccggcggtctcatcgccaagcgcattacggatgtgccgggcgcgtcgggcgtcttcatgggcggcgtcgtgagctatacgaatatcgttaagcaccgcgtgctcggcgttccggcggacatgctggaagagtacggcgcggtgtccgcgcccgtcgcccgcgcaatggccgagggcgcacgcaaggcgacgacggcggactgcgccgtcagcgtcacgggcgtcgctggacccgaccgcgacgagcggggaaatcccgtcggcacggtgtttatcggattttcctctgccgaggagacgatcgccgagcgctttgacttcggcgtaaagtcccgcgcagagattcgcgaggaagccgcggatgaagccttcaaactgctggaagagaagctgaaggaagcataagggccgagagccgtgagaaaggagaaaacatgaaaagaaacaccggactgttgcttgttgcactgttggcggcgctgacgcttttggtgtcaggctgcggagaaaagcagcaaacgccggacggcgcaccggacgaacccctgatgcaggagaaagacctgacgatcgagccgcagccggacgcgaactttacgctggagctgccggatggtttcctgagccttggggcggactacgagccgaacgggaaaacggagaatacgacctacgacagcgacgggatgctgccctatgactttgcgcgccattacgatgcggacgcgcagctcgtcgtcgggacggattactaccctgaaacagggcgcgaggtcatcagctatctgcgtaccggcgctgtgggcgtgggaacgccgcgcggcgtcaaggtcggcgacagcgagaaagcgctgctgacggaatacccggaagcgctttactgcatcgcggcagacgagtccgagctctatgacggctacagcgacgaaagcggctacagtgagcctgcgtatgacttcgaccgcgcctacgtctggcagccgcagacgccgcaggacgacggaaactatgacgtccgcgacattgcgttttacctgaaagatggcacggtgagcgcgatcacgatgacaaagccgtatgcgttccgctttgcctacggcgtggaccgcgacgcggcgctgcgccttgcggacgagaaccgtgcgcagctgtgcggaaagtaaaaaaaggaacaaaaagcgagggacgcgtgagcgtccctcgctttttactgtatttaataggtgccgggatcaaagctcgagcgcgatctgcgcgtcgtcgacggtggagacgtccagcccgaattcgctcggcaggtagcgcgggcagacgttttcgcccgtcgtgatgacggacgcggcaaggcgcgtgccgatctcgcaggattccatcatcgttttgccgtaggtctggccgatgaccgcgccggcaaagaacgcgtcgcccgcgccggtcgtgtccttgacgtcgacctttttcgcggggcagtagccgtcctcgccgtcgagcgtggcaaataccgcgccctgcgcacccatcgtgacgaccatgcggtggatctgcgcgccgcgaattttgtcgcgcaggatggggagcatctcgtcgggcgagaggccgtcgtaattttccgaaaacagaatgcccgcctcctgctggttgcagatgaagcagtgcaccgagcgcaaaaagtcgcgccgctcgatggcgatgctcatgttggacacgaccgcgtagacgggcttacggtgcttttccgccagcgcgaacgtgcgcttgacgatgtccttttccatgtcaatctccagaaggatactgtcggcctgagagaaaatttcgtcgccctgctcatcgaggatatcggcgatggggctcaggtcgggccgcttggaaatcgacgcggtcacatcgcccgtgttgtcgaagatggcgagccatgtgcccatgccgtcgggcgttgtgcggatgtagcgcgtgtcgaccttgtggctctggagctttttgacaacgtccgcgcccgcgctcgtgtcgtcgacaaggctcacgaatgtcggccgcagctcgacgttcgcgatgtcctcgacgatgttgcggctcacgccgccgtgcacctgcacgacgcggcccgcgttgcgcccgccggggatgtaggaagagagggggtagcccttgatatcgacaaacaccgcgcccatcacgacaatactcatggaaacgtcctccgaagttaagtgttatactcagtataccatgctttttagggattgcaaagcggagaatataaggggaacggggcgaaccgaccggttcgccccgttcctatgagagaaaagagagtggagagcaagttaatccttaatgcgcgccttccgtgcctcgacattgcgaatggcgaagagcgtgccgaccgtcagcacgacgccgatggcgaggcagacgatccagttctggataaagcccgcgagcacaaagcacacaaagctcaggcacgcgaccgtgatggcatagggcagctgcgtggcgacgtggttgacatgctccacctgcgcaccggcggaggacatgatggtcgtgtcggagatgggggagcagtggtcgccgcacacggcgcccgcgcagcaggcggaaataccgatgtagagcagcgcgctgtcgctggggaagatggctgtgacaatggggatcaggatgccgaacgtgccccaggacgtgccggaggcaaaggccagcacgcacgcgacaaggaagatgacggcgggcagcatattgtaaaggccctcagaggcagcgtacatcagatcgtgcacatagtctgcggcacccagcgcgttgagcgtggtcttgagggagacggccagtgtcaggatgatgatcggggagatcatggcctggaagcccttggggatgcagcccatagcctcgcggaagccgacgacgcggcgggcgacgaggtagatgaccgtgagcaccagcgcgatgatgccgccccaggggaggccgacgaacgcgtccgtgttgccgaacgcaccgatgaagtcgccggcgtaatcggtgcagccggacgtgtcagcgccgaagaagccgccgacgtagagcatgccgatggtgcagaggatgatgagcataatgacgggaatgacaaggtcgatgacgcggcccttggggttggcgttctcctcggtgctgccggcgctgccggagaggtcacccgtattgcgggcgcgctcttcaaacccgcgcatcgggccgtagtcgaacttgagcagcgtgagcgtgatgatgaagacgaatgtcagaagggaatagaagttatagggaatggctcggatgaagagctggatgccggaaatgccggtgtcaaggtcttcggccgtggaggacacggcggccgcccaggacgagatcggcgcgatcatgcacacgggagcggcagtggcgtcgatgaggtaggcgagcttgggacgcgagatctggtggcggtcagtgaccggacgcataaccgagcccacggtcaggcagttaaagtagtcgtcgatgaaaatgaggatgccgaggatgaacgtcgcaagctgcgcgcccacgcgggtgtggatgttcttttccgcccagcggccaaaggccgcgctgccgcctgctaagttgacgagcgccacgatgatgccgagcaggacgaggaagagaaagatgcccgcgttgtccgcgatcgcggcgatgatgccatcgttaacgatcatgtcgatcgtggcgacgggggcaaagtcgcaggcgaagagcgcgccgatcacgacgccgataaagagagacgagtacgcctccttggtgatcagcgccagcgtgatggcgatgatggggggcacgagcgcccagaaggttccgacaaattgcatgatgtttctcctttcctgtgccgcaaacacagagcaaaaaaattaagccatgatttccatcatgacttaacacaaaaacatcaaacaaccgatgtgaaacacatcaaagctcctgatcgcgtcgatcatgacagcactccgtccttccggacgacagtccgccgggtatttcccgacgacccaagtatcgacaaaacagggattttatcgacccttcggcggcgtcccctttcgcaccccacggtctcctgccgttttgtcgggggctactcatgtcagccgcgcctctatcaagacttatgaaattgtttgcagtatacaccttttttcgattctgtcaagcaagaaaagcatgctttgccgaaaaatggctaaaaattatacgcatgagcgtaaaacggaaaaattttggaacgatttttgtgaaaaacggagagaacttataccccgcagtacgcgagcttgagcaggcggcagaaaagctcgccccacgtgaggtgcggtatgctctcgcccgcgagcagcggaagcgatgcgaccggtgtgccgtttgcgtcgaaaatgtcgagcgtgccgagcggctcgccctcctcgacgggcgcatcaatgctctcgggcagcgagacggcctgcgtcaggccgtttgcgcggctcttttcgagaagcagggcgttttcactcgtcagaacgctttgcaccgtcttctgtgtgccaagtgtcacgggtaccgcgggcagcggcgactcgggggcgacggtgacgagcgagtacgctgcaaagccgtaattcaaaagtgccttggcgtcggtaaagcgcttgtcgctcgtgctgccgccaaggatgactgcgatgagctccatgccctccttttccgcggtcgcgctgatgcagtatttggccgaatcggtcgagccggtcttgagtcctgtcgcgccgggataaaagcgcacgagcttgttggtgttgacgagcatggatgccccgtcgcgcagcgagtccatccagatcgtcgtaaagcggcggatgtcggggtggtgccaaatgagctcgcgcgacatgagcgcgatgtcgtaggccgaggtgacatgcccgtccgcgggcaggcccgtgcagttgacaaagtgcgtgtcgttcatgccgagctctttggctcgctcgttcatgcgcgcgacaaacgcttcctcgctgcctgccaagtgctcgccgagcgcgacggccgcgtcgttgccggagacgacacacacggccttgatgaggtcttcgacgcgcatctgctcgccctctttgagccagatctggctgccgcccatcgatgcggcgtgcgcgctgcctgtgacggtatcgtcatacgagagtgcgccggagtcgatggcctccatggttaaaagcagtgtcatcaccttcgtcacgctcgcgggctcgcgcggcgtgtgttcatccttggcaaagagcaccatgccggtctgcttttccatcaagagagcggagggggcgtcgagcgtgagctcgtcggcgcgcacgggcacgcacaaaagcagcgcgaacagcaggatcatcgggaacattcgtttcatggcggagctcctttcttcgtttggcaaagaatatgaaagaatcagcgacaacatgaatatttcaccttgaaatgacacgaagaatatgatatactccatccgttcgcagggttggtatatcggtattacagcggcttcccaagccgttaaggcgggttcgactcccgtaccctgctccaaaaaagggagacacaccgtgtggtgtgtctcccttttttggaacctgtaggacattaaaaagcacaggggcaagtgaattgcccctgtgcaaatgcttttgcgcagcaaaagcattttacggcgcaaaagcgccggagcctcgacgcggcggagcgcgtctcggcttgattcaaattatttaacggcggaagtgaattccgcctataacaattctccgctgcgctgcgaattgacgcgcgacttcgcgcgaggaacccgtggaacattaaaatgcttgggcgaagtaaattcgccctgcgcaaaagcgccgagggaacggtgtgggtaggagtgcctgcgccgattgggagtgcgcggcgctgttgccgcggagcggcaaggcgcgatggagtgcgggactgatgacgatggatgctgcgtcgattgggactgcggggtgctcttgccctgacgggcaattcgcgatgggggtgcagtcctgatgatggctgatgcgtcgattggaaacgtgaagcgctgttgccccgtaggggcgatttgcgatggcgattattgttcggcggtggtatcgtctttgggcgacgagggtttgccttcggcggtcaggatgcaggtgaggacaaaggcggcgtagagaatagcgcagacgatatccggattgtggagatggtcaaaaaggaacgtacggaatacgatgcgggtgaaaaatgcaccgcctacgatcacgatgaggaagtgcttcagaatgtgcagaaaacgtctgtaaaatgttgcttcttccgtcgacatatacgggttcagggtctctttccaattcatagtgttctctccttattatctctctttaagtaggggaaaatgctcgcttttagtatacgaaatgtttaaatggggggtcaagagggcggaggggaatgcgcctatctctgctgcaccctccaaaatacaagtcgcagaaaaagagaaaaagtttccacgatcagaggaaagctgcggaaaaatctttacaggcgaaaaaatttgcgttatcttaatacaagatcaagagcgccgccgaacagggaaagcccggttcggcggctttttgtgtttgtgtgtcaggaggaaagataaaatgatcggtgtgatcgtcaacgtgctggcggtggcgctgggcggcgttctgggaacggtgttcagcaagaagctctccacccgctttaccacagagctcaacaaggtgttcggcgtgtgcgccatcggcatgggcatcagctcagtgccgctgatgcagaacatgcccgcggtgatcctggccgtcgtggcgggcacggcgctcggccttgcgtgtcatctgggcgagtggatcagccgcggcggcgaactgatggaaaagcccatcggcaagctcctcggcgagagaaacggggacgacgagggcggccttccgcgcgaggaatacctctcgcttctggtggcggccatcgtgctcttctgctcgagcggcacgggcatttacggctgccttgacgcgggcatgacgggaaacgcgacggtgcttttgagcaagtcgattttggactttttcacggcgatggtctttgcctgcaatttgggcgcggtgacatcgctcgtggcggtgccgcaggcggcggtgttttttgcgctgtttttcgccgccaaggcgatctatccgctcacgatgccgacgatgatcggcgacttcaaggcctgcggcggctttctgctcatcgcaacgggctgccgcatcgccaagatgcaggacttccccgtggcggacatgatcccggcgatggtgctcgtgatgccgctgagcgccctatggacaaattacatcgcgccgcttctctgagcgcatggaaaaaagcaccgctgcccaaaaaggcggcggtgcttgcatttttgcgttatgtaaattataatgagacagatcattgacaacagacggaggcaaacacatgaaaaaggtcgcattggtcaccggctcgtcccgcggtatcggccgcgcggtcgcggcggagctcgcgcgggacggctatgccgtgtgcatcaattactatgaacgaaaggacaaggccgacgagcttgtcgcgctgctgcgcgccgaaggccgcgaggccatcgccgtgcaggcggacgtgtcaaagcgcagcgaggtgaacgccatggtcgcgcagtgcgagcgcgagctcggtaagatcacgctgctcgtgaacaacgcgggcgtcgccggtcaggcgctctttcaggatgtgacggacgagatgtgggagcgttacttcggcgtgaacttaaacggtgcgcgcaacaccattcaggcggtgctgccgaacatgttgcacgaaaagagcggctgcatcgtgaacatttcgtcgatctggggccagcacggcgcgtcgtgcgaggtgacgtattcctgcacaaagcacgcgctcatcggcctgacgcgctcgctcgcgatggagctggcgccgagcggcatccgcgtcaactgtgttgcccccggcgtcatcgagaccgatatggtcaaggtactgggcgaggaaacgctcaaggaccttgccgagcaaacgccgctcggccgcctcggcaagcctgaggacatcgccgcggcggtcgcgtatctcgcgtctgacaaggcgtcgttcgtcacgggccaggtgctcgcggtggacggggcgttcgtgctctgagtcagcgccctgtgctgccaaagcccccctcgccgcgcacggtctcgggaagggtgtcgacctgctcaaattccatcggcagaaacggcagcagcacgagctgggcgacgcggtcaccgtggcgcacggtgcgctcttcgttgctgtcgttgtgcagggcgacgaagcattcgccgcggtagtcactgtcgatgacgccgaggcagtttgccggacggaggccttgcttggaagctaagccgcttctggcgacaactgcgccgaacgtgccctccggcagggcaaaggaaagaccggtcggcagcatagccgtcgcgtgcggcgggatgatgagctccttgtcgccgtccaggcaggcgtaaaggtcatagccggcggcgaaagcggagccgcgcgtggggagctttgcgccctcgcgcagcagcttgatcgaaacgttggacatggggaaaacctcctttttttgcatgcgaaacattataaagcctgtgcaaaagaaaagcaagcgcggtgcaaaaagggagtatctggcacaagaataagaattttcccttgccaaacgggggaagttctgctattatactatgatgtaatgtttccgcctgatgcaggcgcttacaaaacgacaaccttttttggaggcttggatagatggcaaaaaacaacgataagcgggcagaacgcatggccagaagcaatcgcaacgtcaatcgtgcgatcacggtgctcatggccggcgtcattgctgaattttatcttttgatggtgaacaactactatgtcaaaggcggcgtcggtcaggtgctcacgatgatgactgtgcttcaggtcatcgactacatcggctgcgcgctgttcggcgcgggccttgtcgtctggctgatgcgcaaaaagtggacgcgcttcgcgcccgccgcgccgtggctcttatgcatcggctttttcttcgccgtgtcgtcgatcctgatgctcaaggtctacccgcagggcacgacgatgatgtgcgtgatcgtgccggtcgtgatgctcatcggcatcgtgttcctgctctatccgcgtgagttttccgtgcaggccgtgggcctgacggcgtcgctgatggcgatgtacctcatccaccgcggcagcgggagcgacacgtggggcggcatcgtcaccggatgcagcatcctcgcgatctgcgtggtcgcggtgcttggtgtcgctgttttcaaggcgggcaagaacgacggcaagcttaaaaagctcggcgatcttcgcatcgtgtcgcaggacggcgactataagctcatttacgctgtgctcgccgtgtgtgcgctggctatcgtggcggcgctcgccgtcagcagcatcgcctactacggcctctgggtgctggcgatcggcacgttcctcctcgcggtgtactacacggtgaaaatgatgtaaagaaatcaaaaaggaaggcgagtccatttggactcgccttccttttttgctttttatatgtcgcgacgtccttctaaagcccgcatcagcgtcgcgtcgtcggcgaattcgaggtggccgccgacggggatgccgtaggcaaggcgcgtgacgcgcacgccgaacggccgcagcaggcgggcaaggtacatcgccgtcgcctcaccctcagtgtcggggttcgtggccatgatgacctcttcgatgttcccctgcgccacgcggtcgagcagcggcttaatctccaaatcgtcgggccccacatggttcatcggcgagatgacgccgtgcagcacgtggtagcggccgttgtattcgcgcgcgcgctcgatggcgacgacatcgcgcgggtcggcgacgacgcagatgacatgttcatcacgcttcggcgacgagcagatggggcagaggccgccgtccgtcagattgcggcagacggggcagaacgtgacggtgtgcttggcgtcgacgatggcatcggcaaaggccttggcctcctcttcgggcaggctcagcacgaaaaacgcgagccgctgtgcgctcttgctgccgatgccgggcaggcgcgcgaactgctcaacgagcttttcgagcgccgcgggaaagtattccatggacttaacctctcagctctttgatcttggcggggatatccgcggccttgtagacggcggagcccgcgacgagcacgtttgcgcccgcctcgatgcaggttttgcacgtcacggcgtcgacgccgccgtcgacctcgagctcgcagtcaaggcttctctcgtcgatgtagcggcggatggcggaaactttcggcatcatatcggccatgaacttctgcccgccaaagccgggctcgacggtcatcacgagcacgatgtcgcacttgtcaagaaacggcagcacggcctcagcgcgggtgttgggcttcaagacgacgccggcctttttgcccttggcgtggattttgtcgagcgcgaggtggatcttctccggcgtgtcggcctcgacatgacaggtgacgaggtccgcgcccgcgtcgcagaactggtcgacatagcgctcgggctgcacgatcatcaggtgcacgtcgatgggcagcgccgtgcgcttgcggatcgactggagcacggggataccaatgctgatattgggaacaaagcagccgtccatcacgtcgaaatggacgtagtcggcggtagaaatggcctcgacgccggcgccgagctcggcaaagtcggcggagaggatggacggtgcgatcttgacggacatgataagaaccctcctgcgaaaattttcttaacactcattgtagcaaagcgcaggaacaaaagcaatgcaaaaaaatgtaaaagacacttgacatttcgctcacgcggtgctatcctcacggatgtaaagcaagcttgactttagaaaacggagagaagcgatgaaaaaccacattgaagagagaagaaaggcgcgcggcatgacgcagcagcagttggcgtcggaactcggcgtctcgcgccagacgatcatttcactcgagaacgggaagtacaacccgtccatcctgctggcgcacagcatcgcgcagctgttcggcgcgcagattgaggatattttcatttttgaggaggaagaagcatgaagttgaaattcctgaggggcatgaatttgcaggagcagaaaaagtgcggcattctggtgaccgtcatcgggctcgtgatgttcgccatcggatttctgctcggtgatgcgcacatgggcgatttttacagcggccttggctgcggcctctttgtctgcggcgcggtgcggctgctgcgcgtttaccgcctgagccgcgacccggaaaaggccacagattatgacgcgatgctcaaggatgagcgcacgatgtatgttgcgaataaggcgcgcagcatgacgtttttcatctgcgtctacgcagagctcgcggcgggactgctggcgcttttagtgttcaagcagccaatcatcgggcaggtgttgtgtcttgtgacctgcgcgcagtcgctcattttttgtgggacttattggtactacaataagaagtattgaaggcagcgtgggggggctgcttctgtccccacagcgtgtggggacgcggcaaagggggatattctctttctcggaaagagaatatcccccttacacccccaagagaaaggacgaggggggtccccctcgacccccgacattgcagatctggggcttgaagagctgcgcagcctgcggaatcaggtgcggtgtacatggcttcgccatgaatcactgcaattcgaaacattcagcaaccgcgccttactatcgtgaggcgcgagtgacgttacctcggcggcagactgcttgccgaatgcggcattgctgcgctcgccgcattgaggagtgccgcggtagacggatattagtctgcactcctacaagatcagcagagcggcagcggataataggagtaggccaaatcgtatagcagaggcaaacgcggcaacgccgcgcgcaggaagttgcattccggaggcatgaaggtcattcaagtccgagacggccaatctaatccctttctcttagggggtgtaaggggggccattctctttccgcggaaagagaatggccccccttcattcgtgcagcgacgtaggcgctgcgattttgatcttgtgcaagaaaaattgcaaacttgtaaacctttatgaatttactggttgacaatgggcgggcgtcatgttatgatgagcccagttttttgagaaaagggagaatcaccatgaaaaacatcaaaacaagagacctgatctactgcgcactgttcgccgcgctgacggctatcggcgcgttcctgcacttccagcttttccaggcgacgatcacgctgcagttcttcttcacggcgatggcaggattgcttctgggcgcaaagctcggcgcgctgtcgcaacttctctacgtggtactcggccttgtcggcgtgcccatcttcgcggcgggcggcggctttggctatatcttcaaccccacgttcggcttcctgctgggcctgatcccgacggcgtgggtcatcggcaagatcgcggaaaaggaccgttccgtgccgcggcttctgctcgcgtgctttgcaggccttgcggtgctgtacctcgtgggccttccctatatcgcgctgatcgtcaacgtctacaagggcggcaacgtgagcgggatgacgctcgccacggcctacatgctgccctatcttcccggcgactgcctcaagatcgtcgtgagtgtgatcctcgcgcctcgcatcctgaaggccatggagcgcaattcataaaaaattcatcaaaatgttgcatttgcaacttctataaaaccggtaaaatgtggtagactaacgccagtgaaaggcaagcaaaacaattcacatttcaagataaactttatggaggtagcaattatgaaaaagtggctttgcaaggtttgcggttatatctatgaaggccccgaggctcctgcggagtgccccgtgtgccacgccaagagcaacatgttcgaagaggtcaagggtgagctcaagctcgctgccgagcacgaattcggcgtttacggcaagaccgtgaagaacaaccccgacatctccgaagaggacaagaagtatatctttgaccagctgatggccaacttcaacggcgagtgcagcgaagtcggtatgtacctctgcatggcgcgcgttgcgcaccgcgagggctatcccgagatcggcctgtactgggagaaggccgcctacgaagaggcggagcacgccgcgaagttcgccgagatgctcggctccgacctcgagcccaacatgaaggcaagcacgaaggacaacctcaagtggcgcgtcgactgcgagttcggcgccacgagcggcaagtttgacctcgccctgtgcgcgaagaagaacggcctcgacgccatccacgacaccgtccacgagatggcccgcgacgaggctcgtcacggccgcgccctcaagggtttacttgaaagatatttcaagtaaaccagggttcccatcaaagcccagcgaagcggggttaatgggagaaggacgagcagcgaaataactgagctttggcatttatgccgaagtgaaggatatgtagcttgtgaggacgcgctggagcgttacttcaagtaagccgaaaccccttacaaatcaagcgcttttcgagaggaagctgagaaatcagcttcctcttttttgcgttccgcgggaagtgtggtgtgcaactctatgtgcaaaatattttttcggggatggcacagaaccggcagatgtgcagctgcgaaaagtgcaaccttgccggtaggatatgcctttgactgtctgtgctctgaaaagctggaatgctgctgcatgcgcgcgcatagagataacggacgaagggggatgaagatatgaaaaaggtatggcccgcagtgctttgcttactttttttgtgctcctgcggcaaggagaccgaccgcgcggaggcgatgcaggagcagtacaaaaatttggcatcctacgaaacggacgtgcgcgtcagtgtgccgcgcggggacgagacgcttgtctatgccctgcatctgagcgcgcagggcgacgccgtgcgcgcgaccgtcagcgagccggaggagctcacgggcgtcggcgcggtgcttgagggcgacaagctgacgctgacgttcgacgatctggtgctggacgtgggcacgctttcgccgcgcgtgagtgcgctcaactgcgtgccgctcgtgctgcaaaacttcccgaaggtgtatctcgacagctcgggcgcggagacgatcggagacgtcgatgcgctgcgtgccgatttttcactgacgctcagcggcgaaacgttcgcctgctcgctctggcttggtgcctccggcgcgccggagtacgccgagatcgcggaaaatgacaaaattattgccgcggcggagtttacgaattttatttttggtgatatactatcgccggacgcagcgcaatagcgcgcgtcgaaactgaaagcaaaagggtggaagcgtctatggaaagcacgctcaagaggacctgggcggagatcgaccttgaccatctgacccataatttcgaggtcatccgctgccacgtcggcgataaggtgaagctgctcggcgtcgtcaaggcagacggctatggccacggcgcggtggagatcgccaagcggctcgagcagctcggcgcgggctatctcgccgtgtcgaacatcgacgaatgcgaggagctgcgcgacagcggtgtgacgctgccgatcttaatgctgggcttcacgcccgcggatcagacggcgcgcattttgcagcttcatatgacgcaggcggtgcagagctacgccatcgcgaaggaattctccgaacgcgcggtcgcgctgggcgggaaaatgatcgtacacatcaagctcgacaccggcatgggccgcctcggcttttcgtgcgacgaggcgcattttgacgagagtctgcgcgagatcctgcgcgtactctcgttgcccggacttgaggtcgagggcgtgttcacgcacttcagcgtgtcggacgaggacacggaggagagcgtcgcctttacgaaattgcagcatgagcgctttgcgcgcatgatcgaaaaggtggaaacgcaaagcggcttccgcttccagctccaccactgctgcaatgccggcggcattgcgagctatcctgagtgggcatgggacatggtgcgctgcggcatcatcctctacggttcgggagacttggccgaaaagatgggcatgcagcctgtcatgtcgctcaaaacgcgcgtggcgacgatcaaggacttcgctgcgggcgagcccatcagctacgggcgcacatactttacgcagcggcccagccgcatcgcggtcctgcccatcggctacgccgacggcctgcaccgcgcgctctcgaatcagatcgaggtgctcacgccctacggcagggcgaagcaggtcgggcgcatctgcatggatatgtgcatgatcgacgtgaccgacctcccgcaggtgaagtccggcgacgaggtcgagatcttcggcgagcacatcctctgcgcggacgatgctgcgctctgcgataccatcccctatgagctcatgtgcgcggtcagcaagcgtgtgccgcgcgtctatcgcttaaacggcgtacccgtcgacaagaatttgcagccgctttaagaaaagcacgcggcatctgtcctcagcatacgatggactgggggcagaaagacggggaaagttgcgagcccccgtataaattccgcccccgcgtgggagaatgacagtggcccctgaaagggtacttcttccgctcggagtgtgaatagctaagtggatatcaatgtgaaacgcggcgatatttattacgccgatctctcgcccgtggtcggaagcgaacagggcggcgtgcgtccggtgctcatcgtgcagaacgacaccggcaaccgctacagccccacggtgatcgcggcggccatcacctcgcagacgaacaaggcgaagctgccgacgcatatcgcgctctccgcgccggactacggcctgccgcgcgacagcgtggtgctgctcgagcagatccgcacgctcgacaagcggcgcctgcgcgagcgcatggggcgcgtggacggcgagctgatggagcgcatcgacgcggccatcgccgtgagcttcggattacagaacacacaattagtctaacccctccggcgcgcacagaaagagtgcgcgccggggagaaaatgaggaatacagcatgaaaaagagaaacaacgcctttgcccgtctggtgggactgcttttggtgagcgcaacggtgctgacgctgactgtcgccgcgaccggcggcgcgggcacgagcagcgacccgctcgtgacgctgagctacttaaatgaaaaattcctgccgcagatcctctccgaggtggacaagaagactgcctcgcgcgaacagacgctctcgagtaagctcaccgagcaggtgaagagcgagacgcaggctttcgagcagaagtacggtgcgtcgagcggtaatacttccggcggcacggcgatgagctttacggtcatcacgctgaatcaggggcaaattctgtacatgggcgtcggctgcgaggcgatgctgcgcacgggcagcggcgtgtgcgtggcggcgagcaccccggggctcatcgacgagacgtcgggcgcggcgcttgcaggcggccttgccttgcagcagaaccacctttacatggcgacggtcgacagccgaggcgtgcaggcgagcgcgaacagcacaaagctgctcgtgcgcggcaattacagcgtgcagtaaaatccctacataaagaaaagagcttgtgcatagaaatagcacaggctctttattttgtgccgacaggaggggagagcggtgggggactggaaagcattgccgcgcggctcgtttttccgctcggcgcggctcgactgcgcgctctcactgttatccggcgcgatggtgcgcgaggagaagcgcgggaagctgctggcgctgccgtacagcgagaacgcgccgttcccgctggcggagctcttctgccttgcccgcatcgggacggtcggcgggagaaagtgcgtcatctaccgcgtggatgagaaaaattcgcccatcctgtgaaaaaatgcaaattatgtctaccatcccgaaagaaagtatgctatactctctctgactaagatgagaaaagaggttctgcacgatgaaatgcccctattgcggatacaaagagagcaaggtcattgattcccgccctgccgaagagggcagcagcatccgccgccggcgcgagtgcctctcgtgcgccaagcgcttcaccacctatgagacggtggagagcctgccgatggtcgtcatcaaaaaggacggcagccgccagagctttgacaagcgcaaggtcttgaacggcatgatccgcgcgtgcgaaaagcgccccgtgccctttgaggtgctcgagcagaaggcggacgagatcgagcagacgttacagaactctctcgagcgcgaggtcagcaccgagtacatcggcgagctcgtcatggacaagctgcgcgccgtggacgaggtggcctacgtgcgctttgcctcggtctaccgccagttcaaggacatcgacacatttatgaaggaactcaacaagctgcttgaaagcaagtaaaagcgctatagaatgttggggatagagatctcctgcatttcagacagcacgcgaagctgggactgaagctcggcgacacatgcgcggaattccgcctcgtcctgctcgaaggcgaaactgtctgcgcgggcaagaagagactcgacctcattgagttcgtcgtgctgcaaaatgatgtggaaatacgtcgcgtgcgcgtcccagctttcgtgaagcgcggagagatcatcgcgcacgctgtcccagttctccgcctgcgcggtgtcctgcaatttgtcgagctccgcgcaccagtctgtgacaagaccgtcggcgacggcggcattcaagagcgccgcgccaaagagcgcgagcaacaggcagaacgggatccagaaaaatcgcttcatttggcactgtcctttccgatgcacagaattttgcccgcgccgtcgagcgagagcagaaagatctccgacggcgcgcggtagccctgcgcacgcacagttttgtcgagccatgcgctgtctaaacccgcgagcgaaaggttttcgcccagtacccgcccgtcattgatgaagatatgcgggaggaaggtgtcgtccttgacgggctttcccagctgtttaggcgttgcgggctgctcgtcgggatagagcaggactgagagctgcccatcggtttcgagcaccgcgtatttgacgcttgtgaggtccgtcacgccctgagagcggagttcctcgatgagctcgtcgagcgtgaagcggttgtggcgcattgcgtcctgctgcaccttgccgtctaaaatgagcgccgtcgggctgccgcagatcagccgccgcaggcggatggagcgcacgctcccccacgagagcagcatcgagagcgacaaaagcgtcacgatcgggatgacgccgtttaaaagcgggatgccaaaatcctgcatcggcacggcggcaaggtccgaaatgagcagcgtgagcacgagctcgatgggctcgagctcgccgatctgccgcttgccgagaaggcgcagcccgaccatgatgagaaaatagagcacgatcgtgcggataaaagcagtagccatagtcatcctccctttttgggagtttgccccgcggaggggcgaaataaccgctttcatccggagaagtccggtttgaaatacatcaaaatcgcagaagtgaaaggagctatggagtttctccatcataagcgccagcgcccgcctttggcgggacgacgaggtgggaagaggatcgaaatttcggcggatgcttccccgtgcccgtgggcgcgcacacagccgacaaacatgcgggcgaccgcagaacaaaggggctgtgaccacgggaaaagcgacaaatgactgcgcatttgtccttttggcgaagcggctttgcgccgcaaaggggtatttttgcccatttttcaaaaatcatcaaaaggagaatgttatcatatgtgcggaatcgttggattcattggtcaggaacaggcggcccccatcctgctggacgggctcgcgcatctggaataccgcgggtatgactccgcgggcgtggccgtcatctcggcgcagggaaagctgcaggtcgaaaaagcggtgggccggctcaaagtcctcagcgaacagatccacggcggcgcggacctcgagggctgcatcggccttggtcacacccgctgggcgacgcacggcgcgccgaacatcatcaactctcacccccacgtgagcgaaaacggcaagttcgccgtcatccacaacggcatcatcgaaaactacgtcgagatcaaggaatttctgatcggtcagggcatccagttcaagtccgagaccgataccgaggtcgtggcgcagctgcttgaattctactacaacgagtgccacgactttttggaggccgtgggccgcgtgctgcgccgcatcgagggcgcttacgccctcggtatgctctgcgccgactgcctggaccgcatcatcgccgcgcgcaaggatgcgccgctgctgctcggctacggcaagggctgcaacttcctcgcctccgacgtgacggccattatcaagcacacgcgcgacgtcgcctacatggaagacggcgaggtcgccgtactgacgcgcgacggcatcgaggtctacgacgcgctggagcagaaggtcgaaaagaagcactttaccatcgactgggaggtctccgccgcggaaaagggcggctaccagcacttcatgctcaaggagatcatggagcagcccgaggcgctgcgccgcgcgatctccccgcgcatcaaggacggcagggttgtcttcgacgatctcaagctccctgtcgagaaaatgcgcaaatttacccgcattttcattgtggcctgcggctcttcgtatcatgtcggcatgatcggcaagtacaatcttgagcatctgctgcgccgcaatgtcgaggttgtgctcgcgtccgaattccgctacagcgaccccatcgtggacgataagtcgctcgtcattgtcatctcccagtcgggcgagacgctcgataccatggccgcgctgcgcgaggcgaaaaagcgcggcggctatatcctctccatcgtcaacgtggtcggttcgtccatcgcgcgcgagtcggacgacgtgctctacacctgggccggtcccgagattgctgtcgcgacgacaaaggcctactccacgcagctcgcagtgctcgacatgatcggtcttgcgtttggcgaggtgctcggcacggtgaaaaaggaggagtacgacgaggcggtcgcagagcttcagaagctgccggagaagatggagcagttcctcgcgagcgaaagctgcgaggccatccccaagtacgcttcccagtatttcaaccacaattctgtcttcttcatcggccgcaacctcgactatgcgctcggacttgagggctcgctcaagctcaaggagatcagctacatccactccgaggcctacgcctccggcgagctcaagcacggcacgatctcgctcatcgaggacggcacgctcgttatcgcgctcggcacctacgccccgcttttcgacaaggccatgagcaacgtggttgaggtcaaggcccgcggcgcggacgttctcgcgctcgcgaccgagagccaccgcggcgaaatggcaaagactgtcgaaaacgtcatcaccatccccgatacggcgcaaatgctgctgccgtcgctcggcgttgtgccgctgcagctgttggcgtattatatcgcgctccagcgcgggtgtgatattgataaaccgagaaatctggcaaagtctgtcactgtggaataaaaaagggagcacccgtaagggtgcttcttttttttgcgcccgcagggcgcactctattatcccccacaccgtgtgggggacgcgggaaagggggatattctctttctcgaaagagaatatcccccttacacccccaagagaaaggacgaggggagtccccctcgacccccgacattgcgggattgcagcttgaatgactgcacgcgctgcgcagtgtgggtgcggtgtacatggcttcgccatgaatcttctgcgattcgttaccagtcgcaaccgcgccttactatcgtgaggcgcgagtgacgtttgtctggcgacagactgcctaccgaatgcggcattgctgacgctcgccgcattgatgagacttgcagtagacggaaattagtctgcacttctacgagacaggcagagcggcagcggatagtaggagcaaatcaaatcgtatagcaacacccaacgcggcaacgccgcgcgcagggaagtgcaatcggcaagcgccgcatctcttcgagctgctcgcttgcaatggcggggttaaggggcagagccccttgcgttctcttgggggtctaagggggccattctctcacgtgagagaatggccccctttattcgcccccctgcgcagcgcagggaaatattcaccccgccagcgcagcgctgaccgcctccaccgtgaagtccgtccacgcaaggtcgtcctttgcgttctgctcggtgatgaaggcgtcgaagtcttcctcgctgacgctctcgccgttcagcgtataggtgacgctgccgctgtcatcgctgctcacggcggcaaaatcgtcgtagaccagcacgccgttttcaaagcggaagcgggcgtagccattgtcgaacgcgccgttcgaccaggcaacggtgccgtctgccttgggggtcaaaaagccgcggtggaccacctgattggcatagaccgtgccgtcatagcaggtgaggacgacgtattcttcgttgccgctgtagtcgatggcgatcaccagctcgtttgtgccgtcgccgtccaggtcgagcagcgcaaagcgcttgatcgtccagtccatgtccgagccgtccgcgccctcggcggcgtagacgtcgggcgcacggaaggaggcggttgatgcctcgacgccggcgttgatgagattggccgtcgccgtgacgttaccggcgaaaaagtcgtcatagagattgcctagctgtgcattaggcggggtgtcgtcagtgtcatccgactgctgtccgcaggcggtcagcagcagggcgagagtgagcgcggccagaagcgtgcgcagaaaatagcgtttcatgcaggattctcctttttaacgtttgccgcatcggctgcggcattatggatggtaacatgactttagacgaaagtcgttacaaaaaggttgcagtttggagacaaaaagaaacaaaaaagagcgcctgcgcgctctttttattttagaacaaaagggtgactccatgcgtcagcagcgtgatgatgcagcccgcgatgacaacgccgaggaagatgacaggcacggcgcgctttaggcgcatgttgagtacggcggcgatcagcgcgcccgtccacgcgccggtgcccggcagcgggatggcgacgaagatcaaaagcccccacgtctggtagcggaggacgtcggcgcttttcgcctcggcgcgcgcttcgaggtgcgagatgaagccctcaagctttggaatatgtatgcgcacccatttgaacagcgggcggacaaataaaatgataaacggcacagggatcatgttgccgacgagcgacgcaatgaacgccacggggatcggcaggcccatcgcgacgcccgcaggcaggccgccgcgcagctccacgacggggagcattgagatgagcatggtgagcagcgtttcgccgagcggggtttcgtgcagccagagagaaagagagtcgagcatggtgcgcctttctgaaatgcaagcggtacaatacctcattttaaataaaatgatagcacgaaacgcttcgccgcgcaagggccgcgggattaaggttctataaaggtgcagggccccgggtgttcccggagccctgcgctcttgagtacgatcagcggttgttcttattctggttgttctgattctggttgccgttctggttctgattggagttttcctgattctggttcttgttctgattattgcgctccttcatgtgctcgcctcctttcgcttttcttgcttgcaagcatagtgttgacgggcaaaagtaaaaatataccgtgggattttcactttttcgggcaaattgttgttgacaaaccggaaaatagagcatatactacttaagcaaaacaaagaagagcggtgcattcgttctcacccccagcaaagcgaaggggtcaatcgtggaaaacaaagccttcgggcttttttgtgtcatggtacgggtgcggaatgttctgtgctcgttttttgtttgccaaattctttatgaaaaacggaggtgcttcggtattagcagcaacgtgcatcagatcaacgaagagatccgggacagcgagatccgtctcatcagtgcgaccggcgagcagctcggcatcatgtctgccgcgcaggcgcagcacatcgccgacgagcaggggcttgacttagtcaagatctcgccgcaggccaagccgcctgtgtgcaagctcatggactacggcaagttccgctttgaacagggcaagcgcgaaaaggaagccagaaagaaccagcatgtcgtcgagatcaaggaagtgcgcatgtcccccggtatcgacgtgggcgattttaacaccaagctcaaaaacgcccagaaattcattgccgacggcaaccgtgtcaaggtctctgtccgcttccgcggccgcgagatggcacacacggccatcggccgcgatcttcttgtgcgctttgcagagtccgtcgccgaggtcgccaacctggataaagagccgaaaatggaaggccgcagcatgtcgatcttcctttcccccaaggcgggaaagtaactttgagcgccactacaaatacgaaaaggagaaactactatgcccaagctgaaaacccacagcggttccaaaaagagattcaatctgaccaagtccggtaaggtcaaggtcgccaaggctttcaagagccacatcctgaccaagaagcccaccaagcgtacgcgtcgtctgcgtcagggcggctatgctgacaagaccactgccagcacgatccgcaagatgatcccctacaaataatttacaacgatacgctttaaggaggcttatacaatatggcacgtgttaaaggcgcgatgatgacgcgcaagagaagaaacaagaccctcaagctcgccaagggctactggggcaacaaatcccgccacttcaagatggccaatgagcaggtcatgaagtccctgacctacgcttatgtcggtcgccgcctgaagaagagagatttccgctccctgtggatcacccgtatctccgcagcctgcaagctcaacggcatgaactactccacgtttatgcacggcctgaagaccgccggcatcgagatcaaccgcaagatgctcagcgagatggccatcaacgatcccgtcgctttcaccaagctcgtcgagatcgcgaagaacgcctgatttcattcgcttaaaaaaacaccgctgcgtgagcagcggtgtttttttattttctgcacttgcggaaaagatcaaaacgacggaaagaggaagaaacgcatgagaaaaacgctcaaacggaacctgtcctatgacgacaggaaccacctttactatgtctcgctctactacgacggcgaaaacggcaggcgcgtgcgccgcacgcgcacctatcccacgatggagcaggccgagcaggtcatcgccgagtaccgccgcgcccagctgctcggcggcatgagcacgctcaaagaagtttttgtggaggactggctgcgctactggatggatgagctcatcaagccgaactgcgaggaaacgacgtgccacggctacgagaatatcttgaatacccatatgatcccctctctcggcaggctctacgtgcaggacttaacgcccgtgcgcgtgcagcagtattatggcgagctgcggaaaaagggccttgccaacaacacgatccgcaagcaccacgtgctgctgcacgcggcgctcggcgcggcggtaaggcagggcatcgtgggggcgaatgtgacctgccttgtcacgccgcccgcgcgcgaagcgccgcagcaccgtttttacgattcctctcagctgcgcatgctctttcgcgcaagcgagggcacgccgctcgaggtggccgtcaagctcgcgggctgcctcggattgcggcgcagcgagatctgcggccttaaatggcgcaatatcgacctaaagcgcggcgttctgacggtttgcgaggtgcgcaccgccgtgagcggcagggcgcttgaaaaagcgccgaagtcctacgcctccgagcggcggctggcctttggcggcagcgaagaccttgaaacgctgctcaaacggctgcaccgcgactgggagaggcggcggaagcaggaccccaaatacaaccccgagggctacgtcgccgtgaacgaagcgggaaagccctatcagccggacgttctgtgccagcgcatcgcgcagttcatcgccgcgcagggcctcccgccgatctcgctccacgggctgcgccacagctttgcgagcgtcgccaatagccagaatgtgccgatgttcagcatctcgaaggcgctggggcacagctcaacatccgtgacgagcgcggtgtatatgcaccttttcgacgacgcggtgggggacgtcgtctcgcaggtggcgagcgccatcacaggggcggagccgtgagcgtcagggaaacagaaacggcagcgcgggcagggcgagcagcagcgacagcagcgattgcaaggcctttcccctgagatagtaccgcgcggagaggggagaggccgcgagcacgctgagcgtctggcagtggacgctcagtccgccccagccgagcagcgccgcacaggaaagaaaacccgcgcgtgagcagggaagcgccagcacgccgctcgtgagctctaaaaatccgagcagcagcgcgcaggggagcgatgaggcgaaggcctccggcagaaaatgcagcaacagccgcgcaagcaccgtgaaaaacacgacgaacgcgctcacattgaggcatcccgtcagcgcgttctgcaccgccgtggggaaggctgtggaaaagcgctgcgctttcgcgcttttgtgcggatatgttccatgtggcgccggcggcagcgcgcggcaggtgagaagacctgcgcagagcgccgcggcgacgtggatgaggtacagcgccgcgcccgcgcggctggacgaaaacacgcccgcgccgcacacgccgagcagaaatcccggtcccgcgttattgcagaaggcgagcagccgctcgccctcttcctgcgagagcgcgccgttttccacaagctcggcagcggtccgtgcgccgacggggtagccgccgcagaggcccagcgccagcgccgccgcgcccgcacccgaaagaccgaacagcggccgcatcagcggcgacaaaagcgcagagagcagctccgacgcgccgcaggcgatgagcagcgacgagagcacgaaaaacggaaacagcgacgggataagcgtctgcgcgcagagcagcatcgcgtcccgcaccgcctgtgcgctgacctccggcaacagcagcagtgcggaaaagcagcacagcaccgccagaagcggcaaacggtctcttattttcatgccatcacctgaccttccagacgagtctatgcgcggggcaagccgaacttgcccgcctgggacaggcaaatccgcgtgaaagggcgcataggctttgcccaaaggggagatggacgatggaacgaaacgaacggccgcagcgcatgctggcgcgcatggcagagctctttgacctgccggcggacattgtggcggggctgtgccatgtggagatgctgggcgaccggcagctttttctggagggccacagcggcattttgtcctacggaacagagcagatcgacgtgggggcgggctcgctcatcctgcgcgtgcgtgggcagaatttgacgctgcgcagcatgaccgacagcgaggtgcgcatcttcggcaagatcgacgccgtggaatatgtgagatgagggagctatgctgaaaaaagccgtcaagctgctgcgcggcagtgtatgcgtgcgtgcaaagagcgcgtaccccgagcggatgctgaacctctgctccgcgcggggcatcgaattctgggacgtcaggtggatcgacgatacggcgctgtcgttctgcgtggcacgcggcgacctgcgcgcgctgcgccgtgccgccgagggctgcggggcggaggtatctatcgagcgcacggcgggcacgccgtttttcttcgcgcgcctgcgccgacgccacgcgctgtttgccggcggcattctgtgtgcggcgctgctgctcgtcaactcgcttttcatctgggattttgaggtcacgggcaacgagaccgtcccgactgagacgattttgcatgccctgcgcgagcacggcgtgcaccgcggaacgtttatctactcattccgctcgcaggatatctgcaaccgtgtgctgccagaactcaaggacctctgctgggtggcggtcaacgtgcgcggctgcaaggcctatgtgcaggtgcgcgagcgcgtgcgcgcacccgagcgggtaaacgagagcgagccgacgaacgtcatcgcggcaaagccgggacttatcacaaaagtccgcgcgctggatggggagaaaagagtcctgcccggcacgagcgtacagcagggccagcttttgatcgcgggcgtggtggacacgggcggcacagaaaagccgagcgtgacgacgcgctttttggcgggcaagggcgaagtctgggcacggacatggtacgacctcaccgtccgcgtgccgctcacgtatgaaaagaaggtttacaccggaaaagaaaagcgcagccataccttgatttggggcgagaatcggttgaaaattggtgcaaaagggagtagcatttgcaatgttgattgtgataaaataaagaatcaaacacaatggacgctttttggcctttttgccctgcccgttacatgggagacggaaacgctgctgccctacgaattggaagtaacaccacgttcccgcgccgacgcggaggcgcagggaaaagacgtgctcgaaacgtatcttgccgcccttttgggggagactggcagcgtgacgcagcggcgcttttcgaccgctgtggagggcgacaccctcgtcgtgacgctctccgccgagtgtgaggagcagatcggaaaagaggtgcccattgccgtcagtgaaggataacaccgtcagccgcgaccggccggcgtcaacattttttcaggaggaaacacagcatggaacagcgcatcagcatcgaacgcatggagcaggcggtcaatttgttcggctcattcgatgagaacgtgcggctgatcgaatcggaattcaaggtcaccatttccaatcgcgagggcgaactgcgcgtaaacggcgaggtcgaggacacgatgctcgccgtgaaggcgctcaatgcactgctcacgatctcaaaccgcggcgaacccatcaccgagcagaacgtgcgctacgtgatctcgctcgtgcgcgcggggcaagaggatcgcatcagcgagctgacgcaggacgtcatctgcatcagctccaagggccgccccatcaagcccaagaccatcggacagaagaaatacatcgagtccgttttgaaaaaccccatcaccatcggcgtcggccccgcaggtacgggcaaaacgtacctcgccgtcgccgcggcggtcgcggcgttccgcgagcgtaaggtgaaccgtatcatcctgacgcgccccgcggtcgaggcgggcgagcgcctcggcttcctgccgggcgatctgcagagcaaggtcgacccgtacctgcgcccgctctacgacgcgctcttcgacatgctcggcgcggagacgtaccagaaatatttagagcgcggcaatatcgaggtcgcgccgctcgcctatatgcgcggccgcacgctggacgacagctttatcattttggacgaggcgcagaacacgtcctgcgagcagatgaaaatgtttttgacgcgcatgggctttaattcaaaaatggtcatcaccggcgacgtgacgcagatcgacctgccggcggacaagatgagcggactcaagcaggctgtgcgcgtgctcaaggatgtcgagggcatcggcatctgcgagctcacggaccaggacgtggtgcgccacgtgatggtccagcgcatcatcaaggcctacgcggactatgaggccgcgcgaaacgaaaagaggaaaaagtgatggcaaagagacattatatccccgtcacgtcggacgtgcccggcgtgagcgacagcaaatgcgccttcatccgcaaggtcatccgcacggcgctcgccgccgagggggtggactttccctgtgagatcgacgtgcggctgacggatgacgagaccatccacgagatcaaccgcgaaatgcgcgaggtcgatcgcgcgacggacgtgctgagtttcccgatgttcgagcttacccccggcgagctgccgggtgaggaggacgccgaccccggaacgggcctcgtcccgctcggcgatatggtcatctcgctcgagcacgtcgccgcgcaggcgaaggaatacggccactccaaccgccgcgagctggcgtacctcgtgacgcactcggtgcttcaccttctgggctacgaccatctggacgaagggccgatgaaagcgcagatgcgggaacatgaagaggcaattatgaaattgctcgaactcgagcggtgataattccacacaggtgcggagggcaatgccgcctgcgggcggcaagaccacaccccccattttctttccgtggaaagaaaacgggcggtgtgaccgtccaaaagaaaggcgtttaaattggcagcctcgattttgaacaactcttatgcctccggaatgcaactgcctgcgcgcggcgttgccgcgtttagcattgctatacgacttgcctctgcttctatcatccgctgccgctctgctgatcttgtaggagtgctgactaatatctgtttaccggagcactccacaatgcggcgagcgccagcaatgccgcattcggcaggcagtctgccgccaagcaaacgtcactcgcgcctcacgacagtaaggcgcggttgagagtggtgacgaattgcaggggttcatggcgaagccatgtacaccgcacccgattacccgcaaggggtatgccacatccgtaaggcagcagagctgccaacggctgtgcaatgcgcagcgcgtgcagctcttcgagctccaatccggcaatgtcgagggtcgaggggaacacccctcgcctttctcttggggttccaaagggggtattctctttggaaagagaataccccctttgccccgcgtccccacggcagtgggacagaacaccgcgccctttgggcatccaaaaagagaatacagctttcgctgtatgaataaaaaacgttcaacgaacaaaagaaagttgaggatcacctatcatgaacaaaacaaaaaccgctatgatcactgtctgcggacggcctaacgtcggcaaatccagcctgacgaacgcccttgtgggcgagaagatcgccatcgtgtcgaacaagccccagaccacgcgcaaccgcatttacggcgtggtgaatcgcggcgacacgcagtacgtgctgctcgatacgccgggattccacaaggcgcgcaaccgcctgggcgactacatggtcaaggtcacgcgcgaatccattgcggacgtggacgcggtgctgctgctcgttgagccagtggcgcacgtcggcatccctgaggccgagctcatcgaaaagatcaaggcttctcacctgccggcgattttgtgcatcaacaagatcgacactgtcgataaaaaggacgacctgctcgccgtcatcgcggcctacagcgaggcgtatgcgtttgacgccattatccccatttccgcgcgcacgcacggggggctggacgatctgatgaacgagctcggtaagtacgcctctgagggcccgcagctcttccccgacggcatgacgaccgaccagcccgaccgtcaggtcgtgggcgagatcgtgcgcgaaaagctgctgcgcaacttggataaggaaattccgcacggcacggccgtggagatcacgcgcttcatcgagcgcgacgacgaggtcatcgaggtcgacgcgaccatctactgcgaaaaggcgagccacaagggtatcatcatcggcaaaaacggcgcgatgctcaagaaaatctcgaccgaggcgcgccaggacatcgagcgcttcatgggcacaaaggtctacctcgagacttgggtcaaggtcaaggaaaactggcgcgacaatatgaactatatcagaagcttcggctacgacgagcagtaataaattttcccagccatagttcgcgggagttttcctcatgctaagcatgaggtgagggatttgcgaaacggatatttcgcactgtttttgaaaaccggggagccaattttttatttactggcagtaaatgataccccttgaggggtgagggattttccctgcaccgtgcagggaatgcgggaaagggggatattctctttctcgaaagagaattcttcctttttcgcacaggtgcgaatgtcaatgcggcacaagtgccgcgtgatgcgccccccattttctttcccgagaaagaaaacgggcgtcgcccgtccaaaagaaaggcgtttcccattgcaagcgagcggctcgaagagctgcaatgcttgccgattgcacttcctgcgcgcggcgaagccgcgttgagcattgctatacgatttgcccctgctcctactatccgctgccgctctgcctgtctcgtagtagtgcagcctaattatcgtctaccgaggcactccacaatgcggcgagcgaagcaatgccgcatttggcacgcagtctgccgccaagcaaacgtcacacgcgcctcacgatagtaaggcgcggttgagagttgtcgcgaatcgcagaagattcatggcgaagccatgtacaccgcacccgattccgcaggctgcgcagctcttcgagctacaaactgccaatgtgcggggtcaagggggaagcccccttgcctttctctgggggttccaaagggggtgttctctttggaaagagaacaccccctttgaccggcagcagcgcctacgcgctgcattccccctccgcgcagtgcgcggaaaaaaccatcctgcctgcaaggcaaccaccctttacaccccttggtgtaaaacaatttagaggagttttatgtcagaaaaactcgtgaccaaaggcatcgtccttcgcgcgacggcgacgaaggaggccgactacatattgaatattctgaccgactcgctcgggcggatcgcggtcgtggcgcgcggggcgcggcgcaagggaagccgcatcgccgcgggcagcgagcttctggccttttccgagctcgtgctctatcagcgcgggaactggtactacctcgacgaggcgtcgacgatctcgctgttcgacggtatccggcaggacattgagcggctgtcgctcgcgtcgtattttgccgagatgaccgagtgcgtcacggcggaggacgaacccgtgccggagattttgtcgctgctgctcaattcgctctacgcgctcgacacgctgcaaaagccgcagagcatcgtcaaggcggcgtttgaactcaagctgcttgcgctctcgggctacgagccgctgctcgacggctgcgctgtctgcggcacgcacaacccgaaagagccggtgttcgacgcgcagcagggcgtgctgctgtgcagggagtgcgcgggccacggcgggggcggccttctgccgctggacgcgggctcgttcgcggcgatgcgccatgtgctgttttccgagccgaagcggatgctgtcgttttccctctcgggcgagacggaaaagcgctttgccgcagcgtgcgaggtgtttgcgcaggtgcagcttgaccggcgattcaagacgctggacttctataaaagcatgaaaattgacaactaaacgaaatatctgtcgaaagaaatacgaatcggaatcaaaatttcggagaaaactatgagtgaactgtttgaaaaatccatccgcgtgctggaactgccgcggctattggagatgctcgagcatcacgcggtgagcgcggaggccaaggcgcgggcgcgacggctgacgccatcggatgacttcggtgaggtcaaccgtctgctcgacgagacggacgcggcgcgcaaaatgatcatgctgcgcggcagccctgcctttggcggcgtgcgcgacgtgggcgaatcgctctcgcgcgccgagcgcggcggcatgctcaacacgcgggagcttctcgacatcgcggggcttctcacgaatgtgcgccgcgtgcaggactattataaggaggacgaggaggggacggtcatcgataagctcttcctctccctgcacccgaaccgctttctggaggagaagatcacgaccgcgatcctcgacgaaaacgagatcgccgacgcggcctcgcccgagctcgcggaaattcgccgccacaagcgcgcggcggcggccaagggccgccagatcctgcagcgcatcatttcgtccccgagctaccggaacgttttgcaggatgcgctgatcacgcagcgcggcgggcgcttcgtcgtgccggtgaaggccgagtgccgcggcgagctgccgggcctcgtgcacgacacgtcctcgagcggcgcgacgatcttcgtcgagccgatgggcgtggtgcaggccaacaacgagctcaaggagctcgaagcgaaagaggagaaggagatcgaccgcatcctctatgccctctcgggcgaggcggcgagcttcagccgcgacattctgtgggattatgacattctcgtccacctcgacctcattttcgcgcgcggcgagctgagctaccgcatgaatgccatgcgccccgagctcaaaaaggacggcagcgtgtatctgcgccatgcgcgccacccgctgctcgaccccgcgaaggccgtgcccatcgacattgagctcggccgcagcttcgatacgcttgtcattacaggcccgaacaccggcggcaagaccgtgagcttaaagacgctcggcctcctctgcctgatgacgcagtgcggcctgcatatcccctgcgacgaccgcagcgccgtgagcatcttttcctcggtgttggccgacatcggcgacgagcagagcatcgagcagagtttgtcgaccttctcggcgcatatgaaaaacatcgtgcagatcttggacgaggcggacgagcactgcctgatcctcttcgatgagctgggcgcgggcaccgaccccgttgagggtgcggcactggctatcgccgtcatcgagcaggcgcgttcacagggtgcgaagatcgctgcgacgacgcattacgccgagctcaagacctttgccatgacgaccgcgggcgtggaaaacgcaagctgcgagttcgacgtggaaacgctctgcccgacctataagctgctcatcggcatccccggcaagtcgaatgcctttgcgatctcgaagcggctggggctttccgaggccgtcatcgaaaaggccaaggcgcagatggacagcgagagcatccactttgaagacgtgctgacgcagctggagcagaagaggcagcagctagagaaagaaaaagccgaggtcgaccgcctttacgcccagcgcgaggaggacgcgcgcaaggcgcgcgaattccgcacgcagatggagcgcgcaaaggagaacgcgagaagccgcggcgaagccgaggccaagcgccttttggctgaggccaagtccgtcgcggacgacacgttccgcgagctcgacgcgctgcgcaagcagcagaaaaagctcgacgcccagcagatgaacgcccagcgcgccgagatcatgcacaacatcaagcaggcgcgcgacgctgcgggcgtgcgcgacgagagcgcggagcccatccccaagccctcgcggcccattgaggtcggagacctggtcgagatccccggtacgcgccgtcaggccgaggtcacagctgtcaaggacggcacgctgacgctcaaggcgggcgttttgcagatgaaggtcaaagccgacgaggtccgcctcatcgaggcggcggagcgcgcggcgactgccaaaaagcagccgcagtttgccccctcgcagcgcattctgcgcacggcgtccgctgcgcgcgagctcgacatccgcggcatggagacgctggaggccgaaagcgtgctcgataactacattgacgctgccgtcatggcgcatcttgagaccgtgacgatcatccacggcaagggcacgggcgcgctgcgcaaggcggtgcacgcgagcctccggcgcaacaaagccgtcaagagcttccgccttggcaactatggcgagggcgagtcgggcgtcactgtggtcgagttgaaataaatgcccgcccggggaagcgctttgtctgtgtttattgccaaatccgcgccatttcgcgcgaaatggcattgacgaatcggcccccgatggtatatgatacgataaagtccgaaagatttttttggagagggagtagtaacgatgtatactcagaatgttacgatcaacaatgaagtaggcctgcatgctcgtcctgccacgttcttcattcagaaggccaacgagttcaagagcggcatctggctggagaaggatgagcgtcgcgtgaacgccaagagcttgctgggcgtgctgtccctcgggatcgtcaagggcacgaccatcacgctgctggccgacggcgcggacgaaaaggaagccgtgaccgctctgtgcgagctggtttccaacaatttcggcgaataacaaacaaccaggaaaggcggcttccacaggaagccgcctttttccattttaccggcaccattcgaccggatatactattatatattataatgtagagatgaaaagaaaggagggaatgtcccatgacgaagcaggagcttttggacaaggcgaacgacctgccgctcgcgcctggcgtctatctgatgatggacaagaccggctgcgtcatttatgtcggcaaggcgaaaaagctcaaaaaccgcgtcagccagtattttcaggagaattcctcccacaacgagaagacgcgccgcatggtctcgcaggtcgaccactttgacacgatctttgtctcgaccgagttcgaggcgctgattttggaaaactcgctcatcaagcagcacatgccgcgctacaatatcttgttaaaggatgacaagggctatccctttgtgcgcctcggcacggagcactatccgcgctttacgatggtcggcaagcctgcggacgacaacgcgctctactttggcccgtttggcgggcgaaacgagacgcgcgcggccatcgacgcgatctgcgcggcgtttcgcctgccgacatgcagccgcaagttcccgcgcgacatcgggaaggagcgcccctgcctcaaccatcacatggggcgctgcgacgcgttctgccgcggcacgccggacgaggacgagtacatgcgccgcatcgggcaggccgaagagctgctgaacggccactatcgccgcctgacccgcgcactgcgcgaggagatggagcaggaggccgcagatctgcactttgagcaggcggcggcactgcgcgaccgcatccgcgccatcgaggtgctgggcaagcgccagaaggtcattgccggcatctgcgccgatactgatatctggggcgtttaccgcggcgcgctcaaatgcggcagcgctgtgctgcacattgaggacggcagcgtgacgggtcgagacctgaacctcttcgccgcgccgcaggacgagagcgagcagatgatcctgtctgcgctgctgccgcagtattacctcaataagagcgtgctgccgcgcgaaattcttctgccctgcgagatcgagggcgcggacgagcttgcgcagatcttgaccgagcgcgcgggccgcaaggtgacgctccacgtcccccagcggggcgagaaggccgagctccttgccatggcgcagcgcaacgcgcgcgaggacgtcgagcgcgtgacgaccgcgcaggagcgcgagaaccgcacgctgacgcagcttgcggggatgctctcactccctgagccacccgggcgcatggagtcctacgatatctcgaacaccggcgcgagcgatatcgtcgcgtcgatggtcgtctacgagggcgcaaagcccaagaagagtgcctaccggagattcaagatcaaaagcctgtcggcccacccggacgactacgcgtccatggaggaggtgctcacgcgccgcatccagcgctatctggacggcgatgagaagttcagccccctgccggacgtcatgctcatcgacggcggcatcacgcacgcgggcgtcgccgagcgcgtgtgcgcgcagatgcacgtgcacgtgccgatcttcggcatggtcaaggacgaccgccaccgcacgcgcgcgctcgtcaccgcgcagggccgcgagatcgacctgcacgccgcgccgaacgtcttcgccctgatcggtcagatccaggaggagacgcaccgcttcgccatcacgttccaccacgagagccattcgcggtcctcgacccgctcggcgctcgacgggattccgggcgtcggcaaggtgcgcgctcaggcgctgctcaagacgttcaagagcgttaaggcgattcgggaggcggacattttcgccctcgaacgtgtactgccgaaagacgccgcggcgtccgtttaccttcattttcacggggaaacggacgaaaaaaaggatgaaatgtaacttcctctgcgatcgcccatttgacgggaaaagcgaaaaagaagcgcgatttttgtgacctttgccaacaaaaatcaaaagatcaggttgacataaatgaatttcaataaatgaattttcaaaaagtcaaacttgcataatttggcatcgcgacacgctgttgagacggcttttcgtcccctgcgcccggaaagggcgcagggggcgttcctttgctgtccgaggggatagagcgtgcggcggagaagcaaaaaagccagtgtttgcagggctttccgcgtttttgccgccttgcggggcgggagcgggacacacccggcctgctcccaagagttttttgcccgctcggacgggacaaagagcgtcggcaggtgcgccgcctcttcggcgccgagatggcggcgaggcggcggagaggggtgacgatggtttacataaatcgagaaaattacgaattcgatgacttaaatcgcaacttttagaagatgaaaataagaaaaatatcgaaaattttataaaatacagaacttttggcgaacaaacggcggaaacttgacaaattctttttcaggcggtatactgccagcaagttttggaaaagttacattttgtaatcttttccggacgcagcgcacttcctcagctgcgcgaagctgcggcggctcacgccgcgaaaaaaggagtatcccatgcagaagtttttgaaaaatttgttcacagcccagcgctgccgcagagcgatgttttttctgcttttcgcggctgtgatgctgctgaacagttcgcccgagctgcgcgcggacgcgctgtacctcatcgccgacggcgatacggtcagcgtgctcgacggcacaacggacatcccgcaggagcgcgtcattgtcaccggcgcgcagagcggtgacgcggaagtcacacttcctgccggtgaaaaggtgacggtgacacacggcgacgacatcgaatacgccaccacgagaaacggcgagcacgtcagcgagctgctgcgccgtttgcagatctcggtcagcccgcttgagatggtgctggtcgacgtcacggagaaagaggtcgagatcaccgttgcctctgacttcacctactatgagaccgccaccgaggcggctccacacaccacgctgacatccacgtcgtaccgcatccccaagggcgagacgcaggtcgtccagcagggcatcgacggcacgcgcgacatcgtttacgaggtcgtgtatgccgacggccagttcgtctcccgccaggcggtggaggagaaaaacgacacctccgtcgcggagatcacctacaccggcacgctcgtcgacaaggcgcagagcggcgacacggtcaagtccgttgtcaccgagagcgacggcagcggctatcttctgatgaagtccggcgattccgtccacttctccggctcgatgaaggtcacctgcacggcctataccgcgggctacggcggcgtgggcaccagaacggccacgggcacaacggtccatgtcggcactgtcgcggtggataagaaggtcattccgctgggcacagagatgttcatcgtcggctcgtcgggctacacctacggcaacgctgtggctgaggacaccggcgtgcgcggcgcggcgattgacctctatatgaactcctatcaggagtgcaagcagttcggccgccagaaaaactccacggtctacttcctcgactgagcagagcggtttgtcgaatagtacgataaatgcatgttccggatgcgtatgttgcgcatccggaacatttactttattgcggtgacgtgatacaattaccggcagaaaccgaaaggagaacacagaatgaaagccattatcacggtactgggaaaaaatcgggtcggtattatcgcgggcgtcagctcgctgctggcaaagtggaacgtgaacgttctggatatcagccagacgattttgcaggaaaatttcaccatggtcatgctgacggatctcgaaaattgttcgctctcttttacggaactgacggaaaagctgagcgccctcggcgcggagatggacattgcgatccgcatgcagcgggaggacatcttcaacgcgatgcacaagatctgagcggggagggaaagaatcatgctaagccgcaatgatattctggaaacgatccgtatgatcgaccagcagcatctggatatccgcacgatcacgatgggcatctcgctcctctcctgcgcggacagaagcgcagagcgtgcgtgtgaaaagatctacgacaagatcagccgctatgcagagcatctggtcgcaacgggggaggagatcgagcgggaatttggcattcctatcgtcaataagcgggtttccgtcacacccatcgcgctggtcgccgccgcgtcggagacggaagactatgtcccgtttgccaaggcgcttgaccgcgcggccaaaaatgtcggtgttaactttattggcggtttttcggcgcttgtgcaaaagggcatgacggacgccgaccggaagctgatcgctgcaatccccgaggcgctggccaacacggaccttgtgtgctcgtcggtcaatgtcggctcgtccaaggcagggatcaatatggacgccgtcgccctgatggggcagacggtaaaaaagacggcagcgctcacggaaaagcagggcggctttggctgcgccaagcttgtgatcttctgcaatgcggtagaggataaccccttcatggcgggcgcgttccacggcgtgggcgagccggagaaagtgatcaacgtcggcgtttccgggccgggcgttgtgtatcacgcgctgcaaagcgtcaagggccagccgttcgacgtggtggcggagaccgtgaagaaaacggcgttccgtatcacgcgcatgggtcagctcgtcgcgcaggaggcgagccgcaggctcgatacgccgtttggcattgtcgatctttcccttgcgcccacgcccgccgtcggcgacagcgtggcccgcattctggaggaaatggggcttgaggtctgcggcacgcacggtacgaccgccgcgctcgccctgctcaacgacgcggtgaaaaaaggcggcgtgatggcgtcctcctcggtgggcggcttatccggagcatttatccccgtcagcgaggacgagggcatgatcgccgcggcgtcgtccggcgcgctgacgctcgacaagctggaggcgatgacctgcgtgtgctccgtaggacttgacatgatcgcgcttccgggcgacacgagcgcagagaccattgctgccatcatcgccgatgaggcggccatcggcatgatcaacacgaagacgactgcggtgcgcgtcatccctgcgcccggctgcaaggtgggcgacacggtggagttcggcggacttctcggctcggcaccggtgcaggcggtccacccttattcgagcgcggagttcattgcgcgcggcggcagaattcccgcgccgctgcacagcctgaagaactgaaaaaagcggacagccttgactgtccgcttttttatatagaattcgtcttttcaaaacagcagctcgtagcccatcttgatgaagagaagccccagcacgacaaagatcatgccgcgcacgcgcttgctgccgcccttcatggcgtagcgcgcgccgcagtaggcgcccagcatattgcaggccgccgcggggagcgccagcagccaccagaccttgccgctgaagatgaacagcaccgccgaggcgacgttggagcagaggtttgcgatctttgcgcagcccgacgccgtgagaaggtccatcgagagcgccattgtgaacgccatgatcatgaacgtgcccgtacccgggccgatgagcccgtcgtagcagccgagtcccaaaccgatgagcgcggcgcgcgtcatctcctgctgcggcgtgtactcgcgcgcgggtgcgtcgctctctttgccgaaatcctttttgagcatcagcaggatcgccgcgcagggcagagcgacgagcatcatgatcttcagaatgtcctcgttgatgagcagagcaatctttgtgccgatggccgcgccgagcagcgcaccgatccccgagacgatggcgggacggagcaggaccttgccaccgcgaaagtatttgaacgaggcgagcgccgtgccagtgccgttgacgaccttgtttgtccccattgcaagatgcgcggggataccggccatcagataggcgggaagcgtgatgagtccgccgccgccggcgacggaatcgacaaagccgccaagaaagatgagcggcagaacgacgatcaagatctgcggtgtgagctccatgagaacatccctcttttcctgagatttctgcattttatcacacggggaaaatttttactactcttttgcgcaaaatatggtagaatcaatttacaattttttacgcccagcgcgcagaaaggaaccacgctatggaacgcaatgacaaagctgccatcgaggcgctcttaaagcgccacggttttcatttttccaagtccatggggcagaactttttgatcgaccccgccatcccctgtgagatcgccgagagctcgcgcgcaaacgagcagaatggcgtgcttgagatcggccccggcatcggtgcactgagccacgagctctgcgagcgcgcgggcagggtcgtctcggtggagctcgacaagacgctgctgccgatcctggaagagaccatggcccgctttgacaacttcgaggtcgtgtccgccgatattttgaaaaccgatatccctgcgcttgtgcgtgaaaaattcgcaggcctcacgcccatcgtgtgcgcaaacctgccctacaacatcacgacgcccgccatcaccgcgctcatcgagtcgaagtgcttcgagagcatcacggtgctggtgcagaaagaggtcgccgagcggctctgcgccgcgccggggacgagcgcctacggcgcgttctccgtcttcatgcaatactacacggagccggaataccttttcgctgtgccgcgcgagtgcttcgagccgcagccgaaggtcacgtccgccgtgctgcgcgccgtcgtgcgcagggagcctccggtcgaggtcgaggacgagaagttcttcttccgcgtggtgtacgccgcgttcgccctgcggcgcaagacgcttgtcaacagcctgatgacggcgttcggcagccagctcacaaaagagcaggtcacgcaggcggtcacgtcctgcggcttagaggccaacatccgcggcgagcggctggggctcagcgaattcgccacgctgtccgccgagatcgccgcattactgtgacagcacagaagcatctattcaaaaaattgataaaccatatggttgctattgataagacattctgctacaattttcggcagaaaggagtcaaactcaatagcagccatttttcctgtgcatcggttagctccctgccgccccaaagcggcacagcacaccacacaagacgcggtgcaaaatttttctttttcattacaccgtgaacatgctacgagggaaagaacaaatgacgaatttgacgaacaacaaggccgttttgtcgtggatcgacgaaatgaccgccatcaccaagccggacaagattgtctggatcacgggggaagaggaacagctcgacgcgctgcgcgagcaggctgtcaaggagggcatcctcatcaagctcaacccggacaagctcccgggatgctacctgcaccgcaccgaccccgacgacgtggcgcgcgtggaggaccgcacgttcatctgctgtgaaaaggaagaggacgcaggccccacgaaccactgggtagagcccaaggaaatgtacgaaaagatgtatgctctggccgacggcgcctataagggccgcaccatgtacatcatcccgtactccatgtccatcatcggctctccgttcgccaaatacggctttgaactgaccgactccatttacgtcgtgctcaacatgcacatcatgacccgcatcggcaaggccgtgtgcgacgcgctcggcgacgatgagggctttatcaagggcctgcactgccagtgcaacctcgacaaggacaacaagtacatcgtccacttcccgcaggacaatacgatcatctcgatgaactcgaactatggcggaaacgtgcttcagggcaagaagtgcttcgcgctgcgcatcgcctcgaaccttggccgtcaggaggggtggatggccgagcacatgctgatcctcggcatccagaacccgcgcggcgagatcaagtacatctccgccgcctttccctctgcctgcggcaagacgaacctcgccatgctcatcccgcccgagggcctgcagcgctggggctggcgcgtgtggtgcgtgggcgacgatattgcgtggctgcgcgtcggcaaggacggcagactctgggccgtgaaccccgaaaacggcttttttggcgtcgcgccgggcacatccatgaagtcgaaccccaacgcgctcatttccacgcacaaggacacgatctttacgaacgtcgcgcttgacctcagcgacaacaccgtctggtgggagggcctcaacaagacgccgcccgcgcgcgccatcgactggcgcggccgtccctggacgccgcagagccccgaaaaggccgcgcatcccaacagccgcttcaccgcgcccgcgcgcaactgcccgtgcctgagccccgagtttgacaatcccgagggcgtgcccatcagcgccatcgtctttggcggccgccgcgcgaagaccgcgccgctcgtttaccagtccttcaactggcagcacggcgtgttcatcggctcgatcatggcgtcggagaccaccgccgcggcgacgggccgcgtcggcgtcgtgcgccgcgacccgatggcgatgctgccgttctgtggctaccatatgggcgactactggcagcactggctcgacatgggcaagaagatccccaagccgccgaagatcttcaacgtcaactggttccgcaccgacgaggatggcaacttcgcatggcccggctttggcgacaatatgcgtgttttacagtggatcatctcgcgcgccgacgatgagatcggcgcggcggagaccgcgctcggctacgagccaaacacccacgatatcgatatggagggccttgaaatgtcgatgtacgacatgcgccgcctgctctctgttgaccgcgacctctggctccaggagtgcgaggacgcgcgcgaatattacgagaagatcggcaaggtgccgcctgagctctacgaagagctcgacgcgctcgaaatgagattgaaccgcggctacaaggtcaagcacgaataaaacgaagcaatgcaaaaaaggaaccgctcgaagagcggttcctttttacgtaaagagcctcgcagagtttgcgccgcgcacggcgcaaataaatcgaaatttgtttttcgccgcgacaagtgcgtggcgaaaaacactttgcgcggagcgagcgtcgaattggccgcattatgcggccaaccgaggcgcagagcgcagcgaaactttctcaagaaagcggcttcaccgctttcttgaagctatcttacgacgccaaactggaagagatagtctctccacatcggatagtacgcggccttgacgtggacgccgtcgccggagtattccggcgtcagcgcgccggtagagtcgtcgaagacgggattgcagtcgatgtagaagaccgtttcgttgtcggcgagcttttggagctcggcgttgcgtgcgtcgatggtcgaattcttaaagaacgtcgcgtcggacttttcctgcgtcgtgtggaagatggcctgcaaaaagatgatggcgtcaggctggagctcgcgcacttcgtcgagcaggaccttgtactgtgcggcccagctctccgccgtgccggtaccgagctcgttgatgccgagcatcaggtaaattttgccgtagtgcttgccggagagcgcctgcgcaagcgtctgcttgccggggaactccgccttttcgaccgccgaccagaccgtcaggccgttgtggcaaaggtagtcggcatttggcaggcccgcgtagtccttgaagccgtcggtgtgcgagtcgccgatgaacagcgcgtcgtcaaagtagctcgcgtccaccgtggtgaagggggagtcgggcgcttccggttcgggctccggttcgggctccggttccgggtccggaagcggagcggggtctgggacgggaggaggttcgggcgctttgggctcgctccacgggtagactccgtctgcggccgctgtggccattgccgcgacgggcggcgtcgcggcatccagtttttcaagatagtcctgatatacgccggtggggtcaagcgcggcataggcgttgagcgccagcgcgctgacaaagcacagcggcagcagaaaaaagggacgagaggacatgaaaagtctccttagaaacgggaatagaggaaggcgttgcccgacgaggtggcgatgaagtacacgcacacccagaagagcagaaacagcgggagctggacaagcaggctgccgcggtgcttttcataaaagcggcgcggctgcggcaggcagaagaagatggcgagcagcagcagccaccagtaggatgagagcagcttgagcgcatcctgcgcggaaatggcgctgcgcgcgccgaacagcgggaacaggcgggagaaatacgcgccgacgtcctttaagcgcgtgatgcggaagatgacccacgtctgcgggatgacgaagaggagatagacgtgcgagagcactttatgctccttgagaaaatcgccgatgcagaacttttcgagcaggatgaagccaagcagcatcacgccccagaggacaaaattccagctcgccccgtgccagaggccagtgaaaaaccacacgaccgtgagcgagagcaccgtgcgggcattgccgttgcggctgccgccgagcgggatgtagacatagtcgcggaaccatgtgccgagcgtgatgtgccagcggcggtagaactcgctcaccgagcgcgcggtgtagggcaggtcaaagttgcgcggcacaggcagcgcgagcatctgcccgaggcccatcgccatgagcgaatagccggaaaagtcgaaatagagctgcaaactgtagctcaccgcgccaagccatgcgagcggcgtcgacaggtattcgtacccgatgcgctcgagcgatgcccacagcggcgcgagctggtcggcgagcaacaccttgaagcacaggccgacaacaaagagctcaaagccggagaatacgtcctcgcgcgtgaccgtgcgtgctttcagtgcgccgcgccattcgcggtagcgtaagatcggccccatcgtgagctgggggaacgcgatcgtgaaggcggcgtagttgatgagatttttctccgcctccttgccgcgatacacgtcgatgagataccccgcgctctggaaaaggtagaagctgacgccgagcggcagcgcaagctcaacgagagagaacgccgtccccgtcagtttgcccagattttccagaataaatgcggcgtacttgaaatacacgaggcaaaagaggtccgccgccagcgcgatgatcagcagtgcttttcgcgtgcggacttctttccccgccattgcgcgggcgagggcgtagtgcagaagcagcacgccggacagcagcagtgtgtcgcgcgcacccgcgccgatgaagtagaaggcaaagctgcccagcacgagcgcagcatttttgaagcgaaagggcagaatgtaatagaccgcgaaaaacagcggcagaaaataaaaaagaaacgtaaggtcggaaaagctcacggggaaactcctgtcataatttgtcagcgtcttttgtcagcgtcttattgtacacgtcggggcaatgtgcggcaatggaaaaatcaggaattcgtcaagaaaccgccgggtaagccaaaacatgagattttggtttacatgcggcggcaagcgtgctacaatcctaagacggcggctgcgaaaaacgcagcgtttgatattttatgtcaatcgtaagcgataagccgccgactgtcaacctcaaaagggtaacaatttcggttacattttgtaacggaggacgctatgggaaaagagactgttttggcgctgctgctgcgggaaaagggacacttcgtctccggcgaggccgtcagcgccgagctcggcatcacgcgcgcggccatctggaagagcatttccgccctgcgcgcgcaggggtacgagatcgacgccgtcacggggcgcggctactgcctcaagtcgctgcccgacacgctgaccgagcagaccgtgcgcagctacttgggacctgtcgaaaccgtcggcaagcgcatcgactgctttgattccattgactcgacgaacgcctacttaaagcgcatcgcgctcgacggcgcgccggacggtaccgtcgccgtcgcggcggagcagacgagcggacgcggccgccgcggccgcagctttcagagcgcggcgggcaagggcgtttacctgtcgatcttgctgcgtccgaagattgcgccgtcgcagctgatgccgctcacgggtctcatcgccgttgcgatgagccgcgcggtcgaccgcgtggcggggacgcactcgcagatcaagtggacaaacgatctcatcctgaacggcagaaagctctgcggcattttgaccgagctgagcgtcgagggtgagaccggcgagctccagtacgtcgtggcgggcatcggcttcaacgtcagccagcgcgaggaggacttcgacggcgaggtctcgaagatcgcaacgtccatcctgcgcgagacgggcaggctcatttcgcgcgcggagctgtccgcggcgatgatcgaggagctcgatgcgctttatacggcgctcagatccggagagacgagcgggtatcttgacgaataccgccgccgctgcgtgaccatcgggcgcgaggtgcagcttttgtggcaggatacgaaggagaaagtcacggcgcttgacgtggacgaggagttcggcctcatcgttcgccgcgaaaacggaacggtcgagaccgtccgcacgggtgaggtgtccgtgcgcggcctttacggatatgtggagtaaggagaaagtattttgaaggaacttttggaactgtttctcacctttgccaagatcggcgtgatgacctttggcggaggtatggcgatgctgccgatcctcgagcgcgaggtggtgcagaataagcactgggcaacggaagaagagctggtggactattttgccatcggtcagtgcacaccgggcatcatcgccgtcaacacggcgacatttgtcgggcagaagagaaaaggcgcgatgggcggcatcaccgcgacgctcggcgtggtattcccctcgctcgtcattatcacgatcctggcgggactcattacgaactttgcccaccttgcctgggtgcagaacgcctttgcaggcattcaggtgtgtgtatgcgtgctcatcctgaacgctgtgctcaagctgctgaaaaagtcggtcgtggataagcgcacggcggtcatctttgttatcgtgctgctggggaatatgctgctgagcgtttcgccggtgtggttcgtgctgctctcggcgctgtccggcatcgtgctgaaaaatcttgaggggagggcggcaaaatgaccttgtatcttcgcttatactgggaatttttcaaaacgggcctgtttgccatcggcggcggcatggcgacgctgccgttccttaaggatatcggggcgaccacgggctggttttcgcagacggacctgatgaacatgctggctgtgtcggaatcgacgccgggtcctgtcggcatcaacatggcgacctatgtcggctatacggtcggcggcgtgccgggctcgatcgtcgccaccatcggcgaggtgacgccgtcgatcatcgtcattttgatcgttgcggcgatgctcgccaaattccgcgacagccagtatgtcgccaacgcgttctacggccttcgtcccgcctccaccggcctgatcggcgcggcctgcgcgggcgtgatgctccaggtgattgccgggatcacgagcgcgtcgcaggaggattccatcctgatgaaattctcgtgggacggcgcgatcagctggcgcggcatcatccttgcgctggtgctgctcgtcttcacgcgctacatcaaaaagaccaaggacctgcacccgatcgtctttatcggagtctccgcggtgatcggcgtcgtgttccacttcgcgggagtgtaaaagatactcaaaaaagagggacgcagctgaaagctgcgtccctcttttttgagaaagatgcgctccgctttgtgccttgccgcccgaaaggcggctgcgacacgcgcggagcgagaagtgtttttgacgcgcgcgctccagggcggcttctcttgccgccttgcggcaattcaccttctgccgcggcgatttatgattaaaattctttcgtgccgtgcacggcacaaagtctgcgacgctttttcgtgtctgtgttagtcggcggaggcgatgtggctggcgatgcgctgcatgatcatgtcgagggcgactaagttgtggccgccttcgaggacgatgatgtcggcgtatttgcggctcggctcaacgaactgctcgtgcatgggcttgacggtcgtcaagtactgcgtgatgacgctctcgagcgtgcggccgcggtcgcgcacgtcgtgcagcgcgcggcgcagaatgcgcacgtcggcgtcggtctcgacaaaaattttgatgtcaagcatttcgcgcagccgcgggtcctggaaaatgaggatgccctcgacgatgacgaccttgctcggccggatgagctcggtctcacttgtgcgctggtggtctgcgtaggagtagacagggcagcggatggccctgcctgccttgagctccttgagctgctcgaccatcaggtctgtttcaaaggcgtcggggtggtcgtagttctgcttgcagcgctcttcaaagggcctgtcctgatatttataatagctgtcgtggtgcacgacgctgatatcgtcgccgaagtgctgcttcagatgctcggtgagcgtcgttttgcccgaaccggtgccacctgcaatgccaatgaagatggtgttcatcgccagaccctccatgaatcgtttgttgttaagtcgattataggaagactttggcgaaaaagcaaggccgcgcggcggaatgcggcaaaaatttgtgcgtgggcggttgacgcgaagcaaaaaagcaagtattatgtaaaggaacgcggcaccgtgtgtgctcgcgcgcagagactctattttgacaaaagaaaggagcgtcggcatggatcttctcaagtgcccgcgctgcggcgaagaatattcccccagctatcgcagatgcccgttctgcgaggagggagaccatccccgcaagatcaagtacaactccagcaaacagagcggcggccggcgcgtttcggataaaaagcagacgcagtccgtccgcggtgcgatggcggcggtgctcgtcgtcgtgctgctgcttctgagctggtcgctctttggtgacaagatcgtcgcaaagatcacgcccgccgacgacggcaatacccccggcgtgcaggacgatgtcaatacgcccgacgacagcaatacgaacacggacgatccgaacgcgaacaacggcgacaccactgacccgaacaccggtgatgagccgaacgcaaatgatcccgcaaacggcagcgacacaactgccaccaatcccggcaccacgacaaccccgtccaccccgacggtggatgcctcggccctgagcatcaagacgaacgtcggcacgacgctgcccaaggacggaaacggcaactttgactgcacgatcaagccgagcgagaccatccgcctgagcgtttccggcacggacgcgtccgcgacctgggcggtggcggacgcgagcgtcctgtccatctcggcggacggcttgatcgcgcctgccaaggtgggtaccacgaccgtgacggccaccgttggcggcgcggtgctgaccatcacggtgcgcatcaagtaaagagaaaaagaacggccgggggccgttctttttttgcgcaaaaaggggcggctttccttgcaagcactgccagcctgtgctacaattaccttgaaaaagtatttgcaggagctatcgaccatatgacgacccgtgaatttcagcagaaaaagccgctttccattctcttcacctacttcaagccgcaccgcggcctgttcatcctggaccttgtctgcgcgacggtcgttgcgctcatcgatctcgccttcccgctcgtgacgcgcaagtcgatgtacgaccttttgccgaatcagcagtaccgcacgttttttatcgtgatgggcgtgatgatggcggcattcattgtgcgcgcgcttttatactatgtcatttcctactggggacacacattcggcattctggtggaggcggacatccgccgcgaccttttcacgcacgtgcaggagctggacgtcagcttctttgaccacaaccgcacgggccagctcatgagcaggctgacgagcgatctcttcgagatcacggagctcgcccaccacggccccgaggacctgctcatttcgacgctgacgatcgtcggcgcgctcgccatcctgttttccatcgagtggcggctcgcactggtcgttgcgtgcatcctgccggtgttcatcgcggtcatcatgtcgcgccgcagcaagatgacggcagcctcgcgcggcgagaagcagaagactgccgccatcaacgtcggcatcgagtcgtcgctctccggcatccgcacggcgcgcgcctttgccaacgaggaagaggagatcgacaaattcaacgcggcgaacgaggaattcaaggtctccaagcgcaaattccaccacgagatgggtgtgttcaacgcgacgatggaattttttatgacgctgctctctgccgccgtcatcacggtgggcggctatctcatcatgcgcggcgagatgaactacattgacctcatcacgttttccctttacatcgcaacgttcatcaaccccgtgcgaaagctcgcgaatttctctgagatttttgctcgtggctttgcaggtcttgagcgcttcacggcgctcatgcgcgtcgagcccgcgctcaaggacgcaccggacgcgaaggagctcgaacactgccgcggcgagatcgacgtcgaccatgtgagcttttcttacgagggcgaggagaatgaaggcgtgctccacgacgtgagcgtgcatataaggcctggcgagatgctcgccatcgtcggcccctccggcggaggcaagtcgacgctctgccagctcatcccgcgcttttacgaggtgagcgagggcgcgatccgcatcgacggggaagatgtgcgctctcttacgcagtcgtcccttcaccgcgccatcggcatcgtgcagcaggatgtgttcctctttgccgacacggtgcgcgagaatatccgctatggccgccccgacgcgacggacgaggagatcgtcgaagcggcgaagcgcgcggagatttacgatgatatcatggccatgccgcacggcttcgacacctatgtcggcgagcgcggcacgatgctttccggcggacagaagcagcgcgtgtccatcgcgcgcatcttcctcaaaaacccgcccatcctcattctggacgaggcgacgagcgcgctcgacagcgtgacggaggtcaaaattcagcacgccttcgacgagctcgcgcgcgggcgcacgacgcttgtgatcgcgcaccggctctcgaccatccgctcggcagaccgcatcctcgtcatcgaggacggccgcatcgccgagcagggcagccacgaggtgctgctcgcgcaaaacggcgagtatgcgtccctctggcgcacgcagaatgggaaagcatgatggacagacggcagcttttggatcgcgccgcgcgcaatggcgacgagcgcgtgctgctggcgcacattcttgataaatgtgagcagagcaggaaccgcaacatcccgtcggcgacggactttttgagccccgctgagcagcgcagcgcgcaggatttgctgcacgccgcggccatccacgacggctgcgccttctgcggcggatttgagcgcgcggagcggagaatgctcctctttctgcccgactggcaggaggaggccgacgagagcgagtacatgacggcgctccgctgcacgtatcgcaaggaagatacgctgacgcaccgcgactttctcggctcgctgatggcgcagggtgtcacgcgcgaaaagctcggcgacattctggtgtcggagggctcatgcgatttgatcgtctcgcgcgatatcgcgccgtatctgctgcaaaacgtgacgagcgcggggcgggtgaagctctcggtcagcgagatcgagctttcagacttgagcgtccccgagctcaaggtcaaggagattcgcgacacggtctcgacgctgcggctcgacgccgtggcggcaagcggcttttcgatgagccgcggcaaggcgcaggagctcatttcctcgggacgcgtgcagctcaactaccgtgaaacgctcaagagcgacgcccccgtcgcgcagggggatgtgatctccgcgcgcggcctcggcaagtttgaggttgccgaggttggcggcctgagcaaaaaaggaagaacggcgttacttctgcgccgatacctgtaaggagaatcaaacaatgacgatggatgaaaagatcgtgcgcatcaacgcgctggcgcacaaggccaaagccgaaggcctgaccgacgaggagaaggaggagcaggcgcagctgcgccgcgactacatcgactcggtgaaggcaaacctcaaatcccagctcaatacgctctacgtgctggatgaaaagacaggcaagaagacgaagatcgtcgactttgagcgcgagcgcgccgcgagagcgggaaagaaaaaggagaacaggtaaatgagcaaggattttgaatacgatcccgagaccggttcgttccgctttgacgaagggggcgggaagacgaagaaaaagaacgatgtcgacgtcggcggatggattttgatcgcggcgctgtttgccttcggcctgtggcccatcggcctcatcgcgctgatctccaagctctcggacaagccgaagaaggtgaattcctcgcgcggcggcacgcgcacgagcaccagtccgaacgcgaacgttacggcgcgcagtacgaacaaggtagaaaagaccgttgtgcagacagcgaaaaagatgaaccgcgcgccgaaggcttcggacaagaccgcgcgcattctggtgatcgtcggcgcagccatcactgcgatcttcggcatcagtcttgtgaccatgctgggcgaggtcatcgcctacggctggtattcctacatgatggaagagctttttcccatgtgcggcttctttgccggcggcgttgccatgcttgtcgccgggcagcggatgaagcgccgcagcgcacgtgttgcgcgctaccttgccgtgatgggcaagcgcggctacattgctgtggacgaactctgcgccgtgacgggcaagagccgcaagaaggtcgaaagcgaccttgactacatggtcgaaaagggtctgctcggcacgggcgcgtacttagacagcggccgcggaatgttcttccgcaacgccaacgcctttgccgactatgcgaacgaagcggcgaagaaggcaaacgtcacgcccaaggaagcgaatgagggctacgcgggcgcgctgcgcgccatccgctcggcgaacgaccgcatcgccgacgccgtgctgagtgagaagatcgaccatctcgagaccgtcgcgggcaaaattttccgcgaggtcgaggagcatcccgaaaagcagcagcaggccgcgacgttcctcaattactacctgcccacgacgctcaagctgctcgacagctacgccaagtttgaagaggcgggcatcgagggcgagaatctctcccgcgcgcaggagcgcatcgaagagacgatggatgccctcatcaagggctttgacaagcagctcgacgatttgcaccgcaacgaggcgatggacatcgacagcgatatccgcgtgatggaaaacatgctccgccgcgacacggcgagcgtggaggatgatttcggcctcggcggcgcggcagtgcagcgcgcgccggacgaggaataaggtactgcgccgcgctcatacgctctatgaggagaaaggacaagaggcatgaaacaaaccggcagacgatttgacgccgcagccttttacggcggcacgaacagcgaggcctaccgctatctcggcgcgcaccgcacgcggcgggcgggaaaagacggctacgtgttccgcgtgtgggcgccgaacgccgcgtatgtgtccgtcgtgggcgatttctgcgagtggaacggctacgcccacccgatggaaaagaacgcggacggcttctgggagtgctttgtgccgtccctcaagcgctacgacacctacaagtttgctgtgacggcacagacgggcgagaccgtgctcaaggccgacccctatgctttccacgccgagacccgccctggtacggccagcaagctctatgacctcggcggctaccgttggggggatgacgaatggcgcgcgagccgcgcaaaggcacccctcgaccgctcgccgctcaacatttacgaggtccacctcggctcatggcggcggcacgaaaacggcgatttttacgactaccgcacgcttgcgcgcgagctggcggatcacgttctggaccttggctacaactgcgtcgagctcatgcccgtcaccgagtatccgcttgacgattcctggggctatcagtgcaccggctattttgccgcaacgtcgcgctacggcacgcccagggactttatgtactttgtcgaccatctgcaccaaaagggcatttccgtcattttagactgggtgccgtcgcacttctgcaaggacgcgcacggcctcatcgactttgacggtacgccctgctacgaatacgccgaccccaataagcgcgagcacgagggctggggaacgcgtgtgttcgactatggccgcggcgaggtgaagagctttctcctttcctctgctgcgttctggctgcgcgagttccatgtggacggcctgcgcgtggacgcggtcgcgtcgatgctgtacctcgactacggccgcgaaaatggccgttggacgccaaacatcaacggcgggcacgagaatttagaggccatcgactttctgcgcgcgctcaacgagatggcgttttccgtcgacccgaacgcgctgatggtcgccgaggagtcgaccgcgtggccgctcgtcacgcggcctgccaaggatggcggcctcggcttcaatctcaagtggaacatgggctggatgaacgacatgtgccactatttgaagctcgacccttggttccgccagttccaccacaaggacatcacgttctcgctgatgtacgccttttcggagaatttcgtcctgccgatctcgcacgacgaggtcgttcatatgaaaggctcgcttcgcggcaagatgccgggggatgactggcagcagctcgcgggcgtgcgcgcgttcacggcgtacctgctcgcccatccggggaaaaagctcacattcatgggcgcggagctcggccagtggcacgagtgggattttgcctctcagctcgactggtatttgctcgaaaacaaagaaaatcagcagactcagcggtttttcaaggacatcaaccacttttacttatcgcagagcccgctttgggacatcgacttttcgtgggagggctttgagtggctcgtcgccgacgacaaccacaacaacgtcgtcgtcttcgtccggcgcgaccggaaaggtcgcgagctcatcgcggcggtcaacttctcgcccgtcggacgcgcggactaccgcttcggcgtcccgccgaaaaagatataccgcgaggtgtttaccaccgaccttcccgcatacggcggcacgggcgactggcgcaacgaaggagagcttttgaccgagtccatcccctcgcacggcaagccctgctcgctgtgcgtgaccatcccgccgctcggcgcggtgttcttcgcgggcgagggcgaatggcaggaagaggagaaaaccaacgagccgcccgaggtgtgaccgggcggcaacgaaacaaggaggagagaacaagcgtgaagaaagaatgtatcgccatgctgcttgccggcggccagggcagccgcctctacgtgctcacggagaatatggcgaagcccgccgtgccgtttggcggcaagttccgcatcattgactttccgctctcaaactgcgccaacgctggcatcgataccgtcggcgttctgacgcagtaccgcccgctggagctcaaccgctatatcggctcgggccagccgtgggatctcgaccgcgcggacggcggcgtgcacatcctgccgccgtatcagagcgcgggcggtgcgtcgtggtataagggcacggccaacgccatcttccagaacatcggctttgtcgacatgtacgaccccgagtatgtgctcatcctctcgggcgaccacatctacaagatgaattacgctaaaatgctcgctcaccacaaaaaagcgggcgcggactgcaccatctccgtcatggaggtgccatgggaggatgcgccgcgctttggcatcatgaacgtggacgaaaacgacacgatcacggaattcgaggaaaaacccgcgcaacccaagagcaacctcgcatcgatgggcatttacgtcttcacgtggaaaaagctgcgtgagtacctcatcgaagacgagagcgacgaggcgagcagcaacgacttcggcaaaaacatcatccccaagatgctgcaaaacggggaaaagatggcggcgtaccgcttctccggctactggaaggacgtcggcacgctcgactccctgtgggacgcgaacatggatatgctcgcgaccggcagcggacttgacttactcgaaaaggactggccgatctacggccgctccgtctctgcgccgccggcgtatctggggcagaacgcgcacgtggagcacagcgttgtcgcgcgcggctgcacggtcgagggcgaggcggagaactccgtcctctctgagcgctgcacggtggaggagggcgcaagcgtccagtactccatcctgatgcccggcgcggtcgtcaaaaaggacgcgcgcgtctcctacgccatcatcggcgagaacggcgtcgtcggcgagcacgcctttgtcggcgcgccgcccgaggcggtgccgccggagcagtggggcatcacggtgctcggccccggcgcggcggtcgcggatgactatgtgctgcctgccaaccgcatgcgcagcgtggacggaaaggagacggtacgatgaacggactgcacggcatcatctttgcctatgaaaaggctcccggccttcgcgagctgaccgaagcgcgcatgcccggctctgtgccgttcggcgggcgctaccgcgtggtcgacttcatgctctccaacatggcgggcgcgggcatcacagatgtcggcgttgtgctgcacggcaactatcaaagcctgctcgaccacatcggcagcggcaagacgtgggacatggcgcgcaagaacggcggtctcaagctgctgccgccctttgccgacgcgcgcaagttcggcgtggaggaattccgcggcaagatggaggcgctctcgggcgtgcggtcgtacctgcacgagatccggcagaagtacgtcgtcctgtccgacagcgaccttatcatcaatctgccgctgcagaaggtgctggacgcgcacatcgaaagcggcgcggacatcacctgcgtctgcaccgagagcggccagtttgtggaaaacgccacgtatttcaccgtcaacgaggcgggccgcatcaccgagacgcgctgcgcgccgcacaaggcgagcggctgccgcagcctggagatctaccttctgagccgcgatctgctcatttcccttgtggacgagtgcgctgcgcaggataaatacagcttccgcagcgacgttctcggcggtatgggcgatcagctcgacctgcgcgccttcctgtgggacggctttgctgcgcagctgcgcacggtgcgcgaatactatgagcgcagcatgcagctgttagaccctgccattcgcgcagagctcttctgcgccgagcggcccatcctcgccaaggaggatgacgaggcggcgtcctacatcgcgccggattcgcgctgtgtgggctcgctcatcgccgacggctgccagatcgagggcagtgtggaggggagcatcctcttcccgggcgtcaaggtcggcaagggcagcaccgtcaaaaactgcatcctctttaaaaacaccgtggtggaggacggcgtgacgctcggctgcgtcatcgccgacaaggatgtccgcatccgccgcggcggcacactcatcggacacgagagctacccgctcgccgtgagcaagggcagcattgtataaaagcagcaaacagaagaaaggagcttgcagatgaacattttgtatgtgacgagcgaggcggtccccttttgcaagacgggcggccttgccgacgtggccggcagccttccacaggcgctcgcggcaaacggagaccgcgtgagcgtcatcctgccgctttacgagcgcgtgaaggacaagtggggcgagcagctccactttgaaaagtggacgttcgtgcgccttgcgtggcgcagcgtctactgcgggctcttttcgttcgagcgcgacggcgtcacgtggtactttgtcgacaatgagacgtatttccgccgcggcgagctctacggctactatgacgacggcgagcgctttggctttttctcccgcgcggtgacggaactgctcaagtccctgccgcaaaagcccgacgttgtccactgcaacgactggcagagcgcgcttgtgcccatctacatcagggatgaagccgtgcgcgacgacttttataagggaatccgaaccgtcattacggtgcataatatcgaatatcagggccgctacggcagccgcacggtcgaagacctgttcggcctggatcatggctggttcgacggcggcacgatcgaattcggcggcgatgtgaaccttttaaagggcgcgatcgtcacggcggacgccgtaaccgccgtgagcccgacctacgcgcaggagctcaagtacgcgtactttgcccacgggctggaaaacgtgatgagcatgaacgcgcgcaagctccacggcgtgctcaacggcatcgacatgcagcgctatgacccgtcgcgcgacaagagcctcgcagcggcgtattcgcccgatgaccttgccggaaagaagaaggacaaggcagcgctccagcgcgtgctggggctgcaggaacggcccgacacgcccatccttgcgatggtcacgcgccttgtctctcacaaggggctcgaccttgtgtgcgaaacgctcgacgcatttatgggcaagaacgtacagttcgtcgtgctcggcaagggcgacgcgaagtacgagacgttttttgagtacgccaagcagcgctacggcggacgtatggccgtctacctcggctattccgagcagctcgccatgcagatctacgcgggcgcagacctcttcctgatgccgtcgaagagcgagccgtgcgggctctcgcagatgatcgcgatgcgctacggcgcggtgcccatcgtgcgcgagaccggcggattaaaggacactgtccacgcgtatgaagcctggaacggacagggcaacggcttcacctttgccaactacaacgctggcgacatgtgccacgtgatctgcgaggccattgacctttaccatgacaacaagggtgcctacgcgatgctccagcagcgcggcatgaccgcagatttcagctggacgcgctcggcgcaggaataccgcaacatttacgaatccatctgccgataaagaaaaggaaaacgatctatgaccattgactctgtgaagaaaatgaaagacgcgctgtgcgaaaagctgaaagtcagcttcggcagcaccgtggaggaggcgaacgatgcgcagatgatgcgcgcgagcgcccttgtcctgcgtgacgtgatggccgagcgcagcgtggacaccatgcgcgagacccgcgaggaacaccgccgtcaggtgcactacctgtcgatggaatttctgatgggccgcagcctgatgaaaaacgcgttcaatttaggcgttggcgaaattctgaccgaagcgctcgacgagctgggcttccgcgcagcggacatctttgaaagcgagcccgacgcgggcctcggcaacggcggcctcggccgcctggccgcgtgctatctcgactcgatgacgacgctcgacatccccgccgcgggctattccatctgctatgagctcggcattttccgccagcgcatcgtcgacggccagcaggtcgagctgccggacaactggaaggacctcggcggcgcgtggctgctgcccaagccgcaggagaccgagaccgtccgcttcggcggcacggtccgccagttctgggacgacgggcggctgcatgtcgtgcccgagggtgagaccgaggtgctggctatcccctgcgacatggagatcgcgggctacggcacgaagcatgtcaacacgctgcgcctctgggacgcgaagtcccccgtgccgctcgacatgtcgctcttttcacagggcgaatacctgcgcgcgcaggagcagcacgcgatggccgagaccatcgcaaaggttctctatcccgaggacaaccatcccgaggggaagagccttcgcttaaagcagcagtatttcttcgtctccgcgaccgtgcagtccatcgtgcgcaagcacatcgaggtctacggcacggccacgaatttccacgaaaagaatgtcatccagatcaacgacacgcaccccgcactcgtcatccccgagctcatgcgcatcctgatggacgacgcgggcctcgactgggacacggcgtggaacattacgacgcactccgtcgcttacacgaaccacacggtgctttccgaggcgctcgagcgctggccgcaggagctgatgcagtcgcttctgccgcgcgtgtggacgatcatcaccgagatcgcgcgccgctatcaggaaaaaatcgaaaactactaccacgacgaagccaaaacgcgtgaattggctatcatctgggacggccaggttcgcatggcgaacctctgcatcgccggcggcatggccgtcaacggcgtgagcgctctgcactcggacatcctgcgaaacgacgttttcaaataccagtgcgcgatggagccagagaagttcaaaaatgtgaccaacggcatcgaccaccgccgctggctcgcgcagatcaacccgcggctcgacgagctcgtgcgcgcgctcgcaggcggggatgaatacctcctgcagcccgaagcgcttaaaaagctcgaggcctatgcagacgacaccgcggtgctgaaccgcctcggcgagatcaagcgcgcgaataagctcgattttgccgcctacgtcaaaaagacgcagggcatcgtgctcaacaccgacgcgatcttcgacgtgcaggtcaagcgcctgcacgagtataagcgtcagcttttgaacgcgatgcatatcatctacctctatcaacagctgcaaaacgacccgaaccgcgccatgcagccgcgcgtgttcctgttcggcgcgaaggccgcgccgggctacgcggtcgccaagcgcatcatccgcctcatcaactcccttgccgctgagatcaacgccgaccccatctgccgcgacaggctgcaggtggtgttccttgagaactatcgcgtgtcgctcgccgagcatctgatgcccgcgagcgaggtgagccagcagatctccaccgctggcaaggaggccagcggcacgggcaacatgaagttcatgatgaacggcgcgctgaccgtcggcacgctcgacggcgcgaacgtcgagatgcacgagaggctcggcgatgagaacatgttcctcttcggcctgcacgccgacgaggtcgtgcgcctcaagcgcgagggctacgccccgcagaagctctacgcgcgcgacgagaacctgcgcgcggtgatcgacaagctcaaggcgggcttctcagacggcgtttcctacgacgatctcgcctcgcggctgctgatgaacgatgaatacatgctcttgcaggacttcgcgtcctactgcgccgccgagcagcgcatggcagacacctacgcaagaagcgaggaatggaaccgcatgtcgctcatcaacatcgcccgcagcggcatcttcgccgccgaccgcgccgtcgcgcagtacgcggatacgatctggcatgtaccgcacaaataaagatttcaaaagagggacagcaaagctgtccctcttttgatttttacaaagaagtggctgtgccacttctttgtaaagattcgcttcgttctgcgcctcggttgtccgatttaagcggacaattcgacgctcacttcgcgcaaagtgttttctgccacgcacatgtcgcggcagaaaacggattacatagatttcacgcctgcgggcgtgaaactctgcgaggcttttggaacttttttgatggttcttgcgtctaaaggaacaactactgatgaggaggactctgtcatgaagaagttattttcccttatgcttgcgtgtttgctgctcttttcgctctcggcctgcgggcgggaaccgaaggaagaggtgagtaacgaaaagcctgtgatttatctataccccgagcaggagatggatgtgcgcgtgacacttgatcttgcgggcgagctgacgtgcgcctatcccgcctacggtgacggctggagcgtccgcgccgcgccggatggcacgctgacggacgagagcggccaaacctaccgctacctctactgggagggcacgtcggaggcaagctacgatttttccactggcttctgcgtttagggggaggacaccgcggcgttcctcgaggatgcgctcgcgcagctgggcctaacgcgcgaggaggcgaacgagttcatcatctactggctgccgcagatgcaggacaacgcctacaatctgatttcgttccagcaggacgtttatacggattctgccaagctcacggtcgatcccgtgcctgacacgctgctgcgcgtcttcatggcgtggcagccgtcggagaaatttgtcgaccttcccgcgcaggagctttccgcacccgagcgcacgggcttcacggtcgtcgaatggggcggctgcgcggtacagtgataagaaaggagcgtgggagatgaaaaagagacgctgggcgatcatagcgtttgccgtgatctttgccgcggcgtatgtcgcgatgggctattgcattccggcctttcgcatcaagctggaagccgacggctggacgtattttctcgccagtctgcaagcgctcgcgccggtgaagctgatcttttccactgttctgtcgctcatcgcggcgttggccgtgtacaacagcagaatgtttcgacaataaaaaagagggcttgcaaagcaagtcctctttttttatacgatcaactgtttacagattcttgccgagctcgtaagcggcggtcaggtcttcttcgtgaagatcggccgccgtggagcagccgccgacattcagcctgcccacgatctcccagccgagatagtcggccatgaggtcaaacgaagcgttcgcgccggaggcagtcttttgatcctcatcggccatcgcggcgaggaaaacggccttctttttgcccatcagcgcttcattgttggcgtaaaacgccctggcatccttcgtgtcgtatcctgaaaagcaagatcggcatagcgagctggcagtttgcctgcaagtgcagggattatctttattttttcatcagcggtgcgccggtgtgccatgcctgaccgaccttttcgccgatggcatagtagccgctgcggaactggtcgaacacaaatgcattcagctttgcggcgtccaccttgcctttttcatccagcacggcttcatccgccagcacgccgacgatctcgccgatgatgtggtggccgtagacctccatcttgtcctcaacgaccctgcactccagcgtcagcgggaactcctgcacaataggagcgtctaccttttcgctttttacagcactcaagccgctgcgctcgaacttgtccggcatcttgttgccgctggcgatgccgaagaaatcggcggcttcgatatggggaatgtccgcaatgctcaacgtgaacgcaccgcgctttttgatgttctctgaggtcttgtgatcctcgtcaatgttgagagaaaccatgttttcggcacagataccgccccacgccatgttcatcacatcgacgacattatcgtcgccgtaagtggcgatcatcagcacgggcattggaaacagatagggatggacacccaattcttttttcattattaacgacctccatttgcattttggattgacttcatatggtcatcctgctatcatcatagcatgcatcggaaaaaacacaagtactattaataaatacaggtactttctaaaagggaagtgtaaatatgtcctgcatggagaagtatatcaaaagcgcaaattttgccgacaccggattcagctacacgatgtcgctcatcagcggcaagcacaagatggtgatcttatattgcctgatggagtatgagccggtgcggttcaacgagatgaagcgctatcttgggacgatcacagataagacgctcagcagtaacctcaaggagctggaggctgattgtctcatcgtgcgaaaggagtatccgcagattccgccgaaggtggagtattcgctgtcggagcgcggaaagtcgttgatgaaggtccttgaccagctttgcatctggggcgaggaaaacaggttgacagccatgatataatcatacacgactgaaaatatgagaaaacagaggaaaacgctatggaattcacacagggcgtgcgctttgactctctcggactgaccgaagaggtccagcgcgcactgaaaaagaaaaatattgaagagagtacccccgtgcaggcgggctgcatcccgccgatgcgcgagtggaaggacgtcatcgccaaggcgcccactggcacgggcaagacctttgcctttggcattcccatcatcgagcacatcgagcccggcagcgaggagaccgaggccgtcatcttagcgccgacgcgcgagctcgccatgcagatcacggcggagctgcgcgacctttgcgtctaccttccgggcgtgcgcatcgtgtgcctgtacggcggcgcacccatcggcaagcagatcgacgcgctcaaaaagcacccgcagatcgtcgtcgcgacgccgggccgcctgagcgaccacatgaagcgccgcaccgtcaagctcgacaacgtcaagaccgtcgtgctcgacgaggctgaccgcatgctcgacatgggctttatccacgatgtgactcgcattctggacaagctggcttcccgccgcaatctcggtatgttctccgcgacgatctcgcgcgaggtcatggacatcagctggatgtaccagcgcgaccccgaggagatcaccgtgcaggccaaggaggagaataagcccgacatcgcgcagtaccgcatcgacgtgggccagaacgacaaggcgcatgtcatggcgcagatcatccgcgccgagggccacgagcgcgtgatggcgttctgcaacacgaagggcatgacagagcggctcaaggcgtttttgatgatggaaggcctcgaggctgactgcatccacggcgatatcccgcagaaaaagcgcgaggccgtcatggcgcgcttccgccgcggcgagctgccaatcttcgtcgcgactgatgttgccgcccgcggcatcgacgtcgacgacgtcgatgcggtgttcaactacgatgtgccgcttgaaaacgagtattacgtccaccgcatcggccgcacgggccgcgccaagcgccgcggcgtggcgtacacactggtgtcggattatccctccggtatgaggttggatggaatcgccaagttcaccggcaatgaggtcaagaaggcacatctggatgcggaggggaagttagtcgaagactaacagagctttatgcccctgcaccgtgcaggggacgcggttaagggggatattctctttcacgaaagagaatatccccctttgacccccaagagaaagggattagattggcagtctggagctcgaacaatctttatgcctccggaatgaaaatgcctgcgcgcggcaaagccgcgttagcattgcgatacgatttgcccctactcctattatccgctgttgcgcagccgttggtggctctgacgacttacggatgcggcacacccccttgcgggtgccgctctgctcatcttgtaggagtgcgccgtaattctcgtttaccgccagtctccacaatgcggcgagcgcagcaatgccgctatttcgcacgcagttcgtcgccaagcaaacgtcactcgcgcctcacgatagtaaggcgcggttgagagttgttacgactcgcagggattcatggcgaagccatgtacaccgcacccgaatgcgcagcgtttgcagttcttcaagctgcaaactgccaatgtcgggggtcgaggggacctcccctcgcgttctcttgggggggttcaagggggatattctctcacgtgagagaatatccccctttccccgtgcagcgcctccggcgctgcttttcccccctgcgccctgtgggcgcaaaaagtggtatttcccctttcggggaaatgaaaatggtaacaaactgtaacttttatgcccctcacctttacaaggcgaatgattttcgctataatatctccgtattacaaaaaaccaagcagccttcgctgcgttttgccaatgggaggcatgatgaaagcaataaagaggatcacagctctggcgctctgtgcgctgatgctgttgggccttctctccggctgcggggagaagaagcaaggagacgagaaattcgtcctgaacgtgagcgtctgcaacgtgatcaactcgctcgaccccgcgatgaacaccgacacggatgcagacagcgttttctacgcactctatgaaaacctgatgcgcgagagcgacgacggcagcggcgaggtgacgctgacgaacggcatggccaaggagtacactgaggagacgaactacgacggcagcgtgacctaccgcttcacgttgcgctccactgcgcgctggtcggacggggaaaaggtgacggcggatgacttcgtctatgcctggcagagacttgccgaccccgcgacggattcgccgaaccacgcgctgatgagcgtggtggcgggctatgacgacgtgcgcgagacaggtgacaagacgaagctccaggtctcggccaaggatgaatccacgttcgtcgtcacgctgagcgcgccgtgcgcctattttatcgagggcatctgcacggcggttgccacgatgccgctgcgccgcgatctgacagagaacggcggaggctttgacacgccggacacagtgagcaacggcgcgtaccatgtgagcgcgtggacgaagagcggtgagctgacggcggcgcgcaacgacgagtattacgaggcacgtctcgtcgggcccgacgagctgcacttcatctttactgccaacgcggacgaggcgtggcagctctacgaagcgggtgagatcgactacatcgcccacctgcccaacagcgtgatcgccgagctctcacaggatgagagctggaagccgacggcggtgtacgcgacggcgagcgtcctttacaacaacgagagcgacacgttctcgaacgagcacatccgcaaggcctttgaccttgccatcgaccgcgcggccgccacggcggcgggcggcgcggaaaacagccccgcaacgggccttgttccctacggcattccggattccggcgaaacggaggacgatttccgcacgacgggcggcgagctctgcgccatcgatgaagagggcatgagcgcgcgggcaacgcaagcgcaggaggagctgacctacgcgggctattacagcacgagcatgttcccgccggtcgagcttctgtacgtgaccggcacggagaatgacgccgtggcgagcgcgctgcaaagcatgtggagcacgacgctcggcgtgaacgtgatactgcgcggcgtgacgcagtcggagtacaacgcgcgcatggaagcggggaactacgagctcgcgctgcaaaaggtcaccgcgctctacgacgacgcgatgggcttcctcgaccgctggtgcagcgaggatgagcagaacctgatcggctatgaaaacggcacctacgacgtgctgatgggcgtcgccagagcgtcggaaaatcctgtggcgcgcacagcgttcctgcacgatgcggagacgatgctgctcggtgagacggcgctctcgcccgtgtattttgacggcacggcgcacatgctgcgcgacacgctgcgcggcgtctacaccgacggctttggcaacagctacttcgccggtgtgcgcgcgaacacagactgaattgtgtgaaacgaaacaaaatggcagcttttgcccaaaaagctgccattttttcttactttgacaggaaacttgcaaaatagtgcttgctttttacgaacagacagactacaatatgtgtcttgggcggctctgtttgcccgtactttttctgttgtgagggtattaccatgactgcgattttgaatctggccgtcgcgctgctcgcagggcttttgatgacccgtatttttagccgctggcatctgcctgatgtcacggcgtttcttgtgacgggcgttctgatcggaccgttcgtgctgggccgcctcggcattccgggcctcggatttgcaagctacgaccaggtcgaggcgctgagcatgatctccgatgtggcgatgggctttatcgccttttccatcggcaatgaattccgcctgagccagctcaaaaagactggcaagcaggcgatggtcatcggcgtcttgcaggcgctggccgcgctggcctttgtcgacgttgcgctcgtgattttccacttcctgcgccccgatgtgctgtccgtccctgcggccatcacgctcggtgcgatcgccacggccaccgcacctgcgacgacgctgatggtcgtgcgccagtacaaggccaagggcgagctcacggatctgctgctgccgatcgtcgcgctcgacgacgcggtgggtctcatcgcatttgccgtatccttcggtattgcccgcgcgatggacagcgcacagttcagcctcgcaagcattttactctccccgctcattgagatcgtcggctcgctgctgctcggtgcgatcgcgggcttcgtactcacgaagcttgagacgatgttccgctcgaactccaaccgtctgtcgctgagcatcgcgttcattttcttgatggtcggcctttcggcggtggagttcaccgtcgcagggacggattgcggcttttctccgctgctcgtgtgcatgatgctcggcacggtgttctgcaacatctgccccctgtccgacgatctcatggatcgcgcagacaagtggagcacgccgatgctcgcggtattctttgtcatcagcggcgcgaacctgcgcctgagcgtcttttctcagggtgtgctcgtgctcatcggcattgtgtacatcatcgcgcgctcggccggtaagtattgcggcgcgcgctggtcggccaaggcggtgggctgcgaccacacggtgcagaagtacctcggcatcatgctgctgccgcaggagggtgtggcgctcggtatgtgcgtgagcgcgcaggcgctcggtgcggatggcgagctgatccgcaacatcatcctcttctctgtgctgatttacgagctggtcggcccgctggcgacaaaggaatctctcaaggccgccggcgccatcaccgaaaagcccaaggaagtcctcgagcgccgcgagcgcaagctcgccgaggccgagcccaaggaacttctcgagcgccgcaaggagcgcgcaaacaaaaagtaaatccgctgaaaggagatggccttggtcatctcctttttttgcaccgggtgggaactttttgtgaatttgcgcgtctaaagaggaaaggcacttgacataacttgtgaaaattatgtacaataaaggcgaacaaaccgataagggggaatcattatggaaggacgtcgggtcagccgccgcaaaccgcggcgcaatccgctttatgtgctttttatgggactgctggcgctttcgctggtgctcctgatcacggtggtcgtgctgggcttcaagctcaagagcgcgcgcagcgacctcgccgcggcgcagacaaagatcgagcagctgcgcggcggctcgcagaccggcgaggacggccagactgtgaccggcgaagatggctcgatcaccggagagaacgatgtgggcgaccccacgcagggcgataacacgaccggcgataatcagacgggcggcgacacgatcgactggctcgacctcacaggccatgacgaggtctccgtcaggccgagttctgtgtatgacaagtattacatttactacaccaccggcggcgtgaatctgcgcagcggcccgggcacgagctatgacaaggtcacgaccgtgtcgctcggcagcgaggtacaggctgcggccaagcaggatgggtggacgttcgtcagcgtggacggtaagtttggctggatcaactcggacttcctctccaccacgcgccccgcatcgtaacaatatcaagcaaaaaaggagcaagccgaaagcttgctcctttttgctgttcagttgccgccgcagccgcctttatccttcagggagcacgctcctttgaagccgcaggcgttgcagtggttgttcgggtcggacacgacgctgccgctcagaaagcgcagcgcggcgtcgtctgccttgccggaatagccggggaagagcatgatgcccgccatgccgacagcggtgcgctcggtgtcgtcgatcgtgccgcagagcagcgcgtcgatgccgtaacgctccaaaaggccgacggcagcgtcggtgccgttttcttccatcggctcgaggaactcgcgcacgatctttccgtggtcgtcctcataaaaatggaaggcttcggcattggcgagcggggagaaaacctccccactcacaacagggatcgcaatacgcattgcctttcctccttttacacctcaacgcccttgccgtcgttccacttccacgcgcggacctcgggcagatccacgccgttgtccttgatatactggcggtgctcaacgagcttgtcgttcatcttctggatgaggtaagcaccgcggttgccgagctgcggcaggcgctgcaccgtgtcgatgacgagatcgaagcggtcgatatcgttgagcacgcgcatgtcgaacggggtcgtgatcgtgccttcctccttatagccgcgcacgtgcaggttgcggttgtggcggcggtaggtcagctcgtggatcagcgtggggtagccgtggtaggcaaagatgatgggcttgtccttggtaaagagcgtgtcgtactctgcgtcggtcaggccgtggggatgctcggtgtgcggctggagcttcatcaggtcgaccacgttcaccacgcggatcttgagttccggcagctcgcggcgcaggatcgtcacggcggcgagagtctcaagcgtcggcgtgtcgccgcagcaggccatgacgacgtcgggctcctggccctgatcgttcgaggcccactcccagatgccgatgccctgcgtgcagtgcttgacggcctgctccatcgtcagccattgctggcgcgggtgtttgctcgcgacgatgacgttcacatagttacggctcttgatgcagtggtcaaagcaggagagcaggcagttggcatcgggcggcagatacatgcgcacgacgtcggccttcttgttggcgacgtggtcgaggaagccggggtcctgatgcgtgaagccgttgtggtcctgctgccagacgttggaggcgagaatatagttgagggaggcgatatcgtggcgccaggggagctcattgcacatcttgagccacttggcgtgctgggaaaacatcgagtcgacaatgcggatgaaggcctcgtagctgtcaaagaagccgtgacggcccgtcagcaggtaaccttcgaggaagccctcgcagaagtgctcggagagcatggagtccatcacgcggccgtcggggtcaaggtgctcgtcgatgccatcgatctgcttgtcgaggaagcggcggcccgtgacgtcaaacacggcctgcaaacggttggacgccgtctcgtcgggcgcgaagatgcggaagttgcgcgactccatgttgagcttcatcacatcgcggacataggtgccaaggacgtacatgtcctgcgcctcgacctcgccgggggcggggatatcgaccgcgtagtcgcggaagtcgggcgtgcgcaggtcgcgcaggagaagaccgccgttggcgtgcgggtttgcgcccatgcggcgctcgcccttgggcgggaaggacgcgatcagctcgaccggcgtaccgtcctcgttgaagagctcttcgggcttgtaggagcgcagccattgttcgagcagcggcaggtgcttgctttcatccgcgcccatggagatgggcacctgatgggcgcgccagctgccttcgatcgcgttgccgtcgacctccttcggaccggtccagcccttcggggtgcgcagcacgagcatcggccagcgggggcggctcgccttgccgctctctcgcgcggtgcgctggatgcgcttgatctcgcggatggcccagtcgaccgcggcggccatctgctggtgcatcgtctcgggctcgtcaccctcgacaaagcgcggctcccagccgcagccgcggaagaagcactcgacctcctcgtggctcatgcgggagaagatggtcggatttgcgatcttgaagccgtttaagtgcaggatcggcaggactgcgccgtcggtgatcgggttcatgaacttgttgccgtgccaggacgttgcgagcgggccggtctcggcctcgccgtcgccgacgacgcaggccgcgatcaggtcggggttatccgccaccgcgccgaaggcgtgggagagggaatagcccagctcgccgccctcgtggatagagcccggcgtttcgggcgcgacatggctcgggatgccgccggggaaggagaagcgcttgaagagcttctgcatgccctccttatcgcgcgtgatgttggggtagacctccgtatagctgccgtccagccagtcctgcgcgaccatggcgttgccgccgtgaccggggccggaaaggtagatcatatcgaggtcatcgcgcttaatgacgcggtctaagtgcgtgtagatgaagttctggcccgggcaggtgccccagtggccgacaatggtctgcttcagatcgctctcgcgcagcgggcgctcgagcagaggattatcgagaagatagagctggcaggcggtcaggtagtttgacgcgcgccagtaagcgtcgatctgcttgagttcctcaggcgacagcggcggctttttcgacagccgtgcggtgtttttttgcgtaggcatggaaagctcctcctttttcttttggttgatgaggttagtatatcatttaattttaaaaaatcaatagtcagacatagaaagcgagacaaaatcttaaaatctatcaaaataagcggagaactattttgcaatttgcatgaatttaaacgataacaaaacgataaaatagggaaaagacggtgcaagcgcaccgccttttccctatatgagagagatcgagagatgagagaatagcaaaattagtcgatcgggcagacccagccgaacgggtcgggcttcgtgccccactggatgccagtcagctcgtcgtagagcttctgagacagcgcaccgatcttgttgtcgttgaccttgtagtctctgtcgccccagctcagctcgccgatcggggagatgacggcggcggtgccgatgcaccacgcctcctccagcgcgccggacgccgcggcgtcaaagagctcgtccacgctcagtagacgctcctcgacgggcacgccccagctctttaagagctcgatggcggacttgcgcgtcacgccgcgcaggatggagccagtcagcgcgggggtgacgacggtgccattgatcttgaacatgacgttcatgccgccgccctcttcgacgtacttgcgctccacgccgtcgagccacaggacttgagagaagcccttttcgatggcacggtcgcccgcgcggttggccgcgccgtagttgccgccgcacttggcctcgcccgtgccgccgcgcaccgcgcggacgtcctcggtttcgaccatgatgggaacgggctgtaagccgtttttgaagtagctgccggagggggagaggatgatagcaaacgtggcctcatgcacgccgtgcagggcaagcgtcgggtcagtgccgtacaggaacggacggatgtagagggacgtgccgggatcgctcgggacccagttctcgtcgaccttgacgacggtcttgatggcctgcagcgcatcgtcgggatcaagctggggcaggcccagacgctcgcaggagcggttcagacgggcgacgttctcccaggggcggaagagctgtacgccgccgtcgggacggcggtaagccttcatgccctcgaagacctcggtgccgtagtgcaggacgctcgcggccggggacatcgtgatggggccgtagggcacgacgcgcgcgtcatgccagcccttgtcggcgctgtagtccatcaggaacatatgatcggtgaacacggtgccgaagccgagctggtcggacgggggcagcgtgccgggatgggtagtcttagtgatcgtgatattcataaggatgacctcctgtcgaaatttgtttgctctttagatttccttgagatgctccatgttgtggcggacgccctcgcagcaggcgtggaaggtagccttctcgtcggcggtcagcggcagctcgacgacctgctcgacgccgttttcaccgatgacgcagggaacacccgcgaacagaccctcttcgccgtactcgccgcacagctccgtgctggcgggcaggatgaccttctcgtcgtgcagcacggcgtaggccatgcgcgcggcggtggtggcgatgccgtactcggtgcagaacttgccggagaacgtgacccagccgccctcgatggactccttctgcagcgcgtcgcggtcgaagcggaagcgctcgtcggtcttggcccactcgtccagcggcacgccgcggaagctgacgcaggaccagggcgcgaactgctggttgccgtgctcgcccatcatgtagcaggtgatggacttgtggtcaaggccggtctggcgcgccagcgcgctcagaagacgggaggtgtcgaggcccgtgccggtgccgaacacgcggccgcggggcaggcccagatgcagtgccagctcgcgcgtgacgatgtcgcaggggttggtaatgttgatgagcacgccgtcaaagccgctggccttgatcttgtcggcatagccgcgcacagcggggatggtgaagtccatctcggtcacgcggtcgtgcgtgccgcgcagcaggtcgatcttgccgacgctgttgacgatgacgtcgcacacgccaaggtcggagaagtcgccgccgcgcaccgtcacgcggtggggcatgtacgcgactgcgtcgcgcagatcctgcacttcgcttgcgagcttctgctcgttctggtcgacgagtacaagctcgtccgcgatgccctggatcgccagagcgtaagccacatgtgcgccgacatgacccatgccgaccacgccgagaactcttttctttgccataagaatacttcctttctcaaaaacggtgtgcccgtgtagttaactgatcgtttgtgcggcccttacatgccgaagttggggaagagcacgcaggtataaagcatggcgagaaccatgtacaaaacaaggatgatggcgaaggccttgaaggtcttcttcatgacctcgctctcgttgcccacctgatcgaccgttgcgcaggcggcgaccgtgttgttcgggcagatcaggttgccgagcgaagcgcccgcgttctgaccggcgaagatcgtgatggggttcatgccgagcgatgccgcggcgtcgatgtgcatctgggcgaacatgatgttggagccaaggcccgtgccggtgatgaacgcaccgctcgaaccgatgaggacggctgccgcgggatagaagcggccgacgatggcggcgatgtcagaggcgaggaggttcatcatgcccgtggaggaggactgcatgatgtaggcgacgataaggaggctgcccatcgtgacgaggaccggcagcacgccgctcgcggtgcgcttgcagacctctttgtaggtcttgaagttcacgcccagcgtgagcgcgccgaggatgccgcacacaagaatgacaaggtcgacccagaagatgtagccgaacgtgcacatgatggcaaagccgttttcaacgacggcggggaagccgtagcggatgagcgggagcagcacgagcatgtagacgtaaggcgacatggccttgaacgagctgtacttgcgctgatggttggcgctttcattgcggaattcgtccggagtcttcacgccgacgagcttgacatacgcaacggagagaaggatggagatgaggcccgtgcccatggaggtgacctctgcgccgacgaagttggagaggaggaacatcgtcaggcacgtgctcacacccgcgaaagtgaggtaggggagaatgcccttgtagccctttttgccgaacgccatgccgatcatgatgaacgggatgacgagcacgccgaacatgtggaagcggccggccatcgcggcgttctgcgcgacggtggcaaggccagcgtcaacgagggccgcaccgccgttgatggtcgtcaggcccgcgccgccgaacgaggcgggcgtcgcgtcgccgagcagcgcgatggcgatggaggtagtggggttaaagccgagggccacaaggaacggggcggcgatggcggcaggagcacccgcgcccgccgcgccctcaaggaagatcggcagcatcatgccgatgatgacgacctgcacgcggcggtcgtcgctgatctgcgcaatggtggctttcacatcctcgatggcgccggtctcgcgcagcaggttcaaaatggtgaacgcgccgaagaccatcagcacgatcttgaggccttccttgatgcccttccagaccagggggtcaagcaccttgacgttttcagcaaacgtgaggccgtcaaggttgaaataggtaaaggcaaggataagcgtccaggcaagggcgatgggcgagacggtttttgcggattttttgaagcccaggatgccgacaagcacgacgacaattgggctgagcgccatgaggaagtttaaaaagtccattggagggatctctctttctgaaaaatgtggaatggggggatctatttccgcttttttcgccggccgaacgagaaaaagtgaaaaagctaagaggaagaggctccgtcgaatcgacggagcctctttcgtgatatcagtctctatctcgtgcggagaatcgggagagaagtcgaagttgcgtcgcgattcggacgggctgttcagttttgtttcttaccagtactgccagaggcagaataataaaggacgccagcagaataaggctggcgtccagaataatcatgctgttcatatcagaacaggagaaagcggcacaggcggcctgtgcgaagtgagatgcagctgcattggcaaaaaactgagtcatcagacgtttctcctttcctgaagatgaacgcatcttaacacacattttttcaccctgcaagggggaaaagcgactgattatgcaagattggacgagtacacaaaaaacggaaatacccacttttcgacattgttaaaaagacataatgaatcctaatggttccttcatgtcatggaaagaagcactgcatagggacttcccgtgcggccataggatggagaaaaagaggaggcgtttttatgctgtcgattgcactttatttgcttacgcacgccatgctgctctcgctccacctgtcgggcggctcgttcccgcgcccgctctcggcacaggaggaaaagaaatacgtcgagcgcatgcttgcgggcgacattgaggcgcgcaacgtgctcgttgagcacaatctgcgccttgtcgcgcacatcgccaaaaaatactacactcagtctgacgagcaggacgatctcatctccatcggcaccatcggtctcatcaaaggcgtttcgagctaccgcccggaaaagggtacgaggcttgcgacctatgccgccaaatgcgtggagaatgaaattttgatgtactttcgcagccggaagaagttacagggcgaggtgtcgctcaatgattcgctcgattccgacgccgacggcgagtcgctctacctcatggatgtcgtcggcgtcgaggacacgatgtatttggacattcaggaccgcgacgactgcctgcgcgtgcgaaggctcgtgcacgagtgcctgaccgagcgggaggaagaggtcatcacctcgcgctacggcctcggcggccggatgccccgcacacagcgcgaggtcgccaaaaagctcggcatctcgaggagctatgtatcgcgcatcgaaaagcgcgcgctgcaaaagctggaggaagccctcggtgaacgggaataaaaaacgcggggcgcagatgcctgcgccccgcgcccgctcaggggatgagcggaagagagaaagagaagaatatcatcagagaatcgtgccgccaccgagcacggtgtcgccatcgtacagcacgacggcctgacccggcgtgatagcgcgctgcggctcgtcgaagacgaggtgcacgcgcccgtcagaaagcaccgtgactgtcgctgcctgctcgcgctggtggtagcgcacgcgcgcggtcgcgcgaagctcgcgcggcgggacatcgtaggcaatccagttgaagtcatttgccgtcagctcacgagaaaaaagcgcgtcgttgccgcttagcaccacgcggttttctgccgcatcgatgcgcttgacgtagagcggcgcgtccgccgcgatgccgaggcccttgcgctggccgacggtgtagtgcacgatgcccttgtgctgtccgagcacatgaccgctttcatcgacaaagtcgcccgcagggcagtcgcgtcctgtgtagcgcgcgataaagcctgcgtagtcgccgtccggcacaaagcagatatcctgactgtccggcttgtccgcgttgtagaagccctgctcctccgcgatgcggcgcgtcttgctcttgtgcatcgcgccgagcggcatgcgtgtatgcgcgagctgctcctgtgtgagcgagtagagcacgtagctctggtccttgctctcatcgagcgattttttgagcagccaccgctcgttttcctgctcgatgcgcgcatagtggccggtcacaatggcgtcgcagcctaaaatgcgggcgcgctcgtagagccgctcaaacttcaggtagcggttgcagtcgatgcaggggtttggcgtcgcgccgcgctcgtaggacgagatgaagcggtcgatgacctgccccttgaagtcgtctgaaaagttgaagacatagtaggggatgccgaggcgcagcgcgacaagccgtgcgtcctcgacgtcctcaagcgagcagcaggtcttcgtgcggctgacgccgatgtcctcgttgtggaagagcttcatcgtcgcgccgatgcactcgcagccctgctccttcatcaaaaatgcggcgacgcttgagtccacaccgccgctcatcgcaatgagcaccttatccatatttcctcacatcatgcggcacgctttggcgcagggaatgtccctgtgagaagcgatgccgcgcttatcgttttgccttattttgccgcgtgcttataaagtgaacggctttttgccgctgacgaggtccttccacagcggggacatgccgcgtaagtattccacgacctcgggcacggcttcgaggatgcggtcgacttcctcgtcggtgttccactcgcacaggctcaggcgcagcgagccgcgtgccacgtcgtgcacgcggccgatggccagcagtacgtggcttgggtcaagcgagccggatgtgcacgcgctgccggacgacgcgcagatgccctttgcgtcgagcagaagcagcaggctctcgccctcgacgccctcgaagcagaagcttacgttgccgggcaggcgattcacgggatcgccgttgagcgcgctgtgcgggatcttggacaggccgtcgatcaggcggtcgcgcagggcgctgaccttttttgcattctcgtcaatgtgtgcgcaggcgtcttcgaaggctgcggccatgcccatgatggcgggaatattctccgtgccggcgcgcttgccgcgctcctgcgcgccgccctcgatgaggctcgtcaaggcgatgccctggcgggcgtacagcacgccggcgcccttcgggccgtggaacttgtgcgcggagagcgacagcaggtcgatgttctgcgacttgacgtcgatgggcagatgccccgcggcctgcacggcatcggtgtggaacagcacgcccgcctcgcggcagactgcgccgatcgcaccgaccggcaggatggagccgatctcgttgttggcgtacatgacggaaaccaggcacgtatcctcgcggatggcgcgcttgacctgctgcgccgtcacggtgccgatggggccaacggggagcagttcgacctcgaagccctctttttcgagcttttggagcgtgtgcagcacggcgtggtgctcgaacgcggtcgaaatgatgtgctttttgcccttgcgttcgccgaggcgagcggcggagaggatggcctgattgtcggcctcgctgccgccggaggtgaagtaaatttcgcgcggggaggcgttcaggcattttgcgatgcggtcgcgcgcgctgagcagcgccccggccgcctgctggccgacggaatgcaggcttgaggggttgccgtagatcgtctccagataggggagcatggcgtcgatcgcggcgcggctcatctgggtcgtcgcggcgttgtccgcgtaaatagtggtcattgagataaatcctatcttataagtatgttgatatgatacacaggaacgttcgctttgtcaatggattttgagatcgcgaggggagtgcaaaaaaggaagaaccgctcttgcgagcggttcttccttttacaatagggggtggaggatttttgacttacttttccagctgcgtccagtcgcgcgtctcgcgcagctcggtccacttttcatactgggagttcgtcttgaactcgtagtagtggctgttcgtcgcttcctggacggcgaggtagtaccaggccttcgggtttgcgttgtccgtccagaccgtcatgttcgggaggagatcgtcctcggtctcgggctggcggttcagcacgcggttgacaagcgtcatggtctcggcacgggtgatgtcgcgctgggggccgaaggtgccgttgggatagccggtgatccagccgttgttgtaggcgatgctgatctcatccttggcccagtgggtcgcgatatcgctgaacttcgcagcggtcttgtcgccgtcgttgtcgaagcgggcggcgatggcggcgaactcagcgcgggtgatggcggcgttcgggcggaacgtgccgtcggggtagcccgtgatgatgcccatggagctgagggtcgagaccgcggtgttgtaccaggaggtagcggccacatcggagtagcggttggtcttggtcaggttctcgtcgcggacgtcgtcggtcagcaggcggaagaagatggtcgcaacctcggcgcgggtgatgttgttctgcgggcggacctcgccgttgccgtaaccgacgatataggcgaagtggtcggtcgtgttcagaccgagcgcgtcatcgtcttcgatctccacggtgggcttgggacggggatgatgcggacggcgataggtgtactcgttggtaaactcaaccttcgttgcattctccatcggaacaaattcaccattaccttccgcacggaatgcaaaattacttgcgctggcaacagtaccgccatctttttctaccaccgtcaaggtaaaggaatatgtcgtatcgtcgtaaacgatatcatcgtccttgccgttaccctcgtacacttcaacgcggtatgtgcctgcgggcagggaaatttcctcaaacttaaacgaatccgagtaaccagtcttcagtgtgacagaaccttcgcattgaaccagaccatcgtccagagttaagctatcgctgacctcaatgacaggctgctgctcaggcgcagcgggctgctcaggcgcagcggactgctcaggcgcagcaggctgctcaggcgcagcgggctgctcaggcgcagcgggctgttcaggcgcagcgggctgttcaggcgcagcgggctgctcgggcgcggcgggctgctcaggctcggcgggctgctcaggctcggcgggctgctcaggcgcatagacgaagtaaggcatcaccgttgcataagcacggaaggtctcttcggtgctcgcgccgtatctgctctcaaagttcttgaagataaaatcgccgagctggatcgtgccgagcttggtgtagaggaccttgatgacgttctcaccctcaatgactgtgtaggtgctgcccacttggacgcctggcttgtagccatcgggctggtatgcgttaatcagcgggaaaccaaggtcaatctgatcgccgacaacctgattcttcatgacaaagggcgtctcattcaggcgattattctcttcgacggaatccttatagtaccgaacttcaacatccgcatacttggtggtgggctgcttctccgtgatggtaaagtcgcccttcattactttaacagtgtagttgctattctcggtatactgggcatccagcacgttgctatagatgccggcagtttcaacacccgtgttcgtgcgaacgtaagtgatcgtgccaaggtcgttttcatcgaccaatccagccaccgtgccggtaaactcaggatcattttcgcctactatcttcgatttgtcagcgacagtgatggtcacagctttcgggttgatcttaagtgtaacattatcgcaagtcagatcggtataaccgactttagttgccttgacgcttacagtcacaagaccttcagtaacatcagttacgctgggagcatcagtagtccaatcagcatcgccgaccttgtagtaaatggtgtagccgtcagcaccgcttacgctggccatagcggtatgagggttaccgtcatacgtccactcgccgccctgagcggtcagaagagcgccgctggtcgcggtcttgatctcaaagtcgcctttctctacgataacatcgtaattggtattattagtgtactgggcatccagcacgtccggataggtgccaacagcttcaacatccttgttcgtgcgaacgtaagtgatctcgccaaggtcgcccgcgttaatcaaatccggaggaaccgtgccggtgaacgcgggatcgtcatcaccaaagaactttcccgcatcgttgaccttgatcgtcacctgtttaggcgtgatcgtcagcgtgccttcaaccttgttgatgttatagttggccgcatttgtaccagtgttcagtgtatactcaaaagtgttttttgcaggttcggtactgacatccgtcgccgtgccggtgacggtatacgtcgcgccctcgcccttaacaaaaccgtcgccgccaacggtgacctcatgcttggtcaggggatcgccgtcgtaaaccttctcgtcgctggcggaggtcagggtcacatcgcgcttggtgacctcaatggtgtactcggcagattctgtctcatagcccttcttctcagccgtgaccttgacatcaatcttgccaacgttcgtgagagtcggtactgtagacgttgcagttgtccagtcaccgtccttatccttggtctggtaggtcagcgttgcgccgtcggaattcgttatttcgccgccgtgcgcgccgccgtcatacttgccggtatagtccgtagcggtaagcgtcatcgtcttgggcgtgaccttgcctgcggggatggggaagtcaaccgaagcgccctcgaccgtcagtgtggtcttgccgttcaggggcacgtagccgtcctcatcagcctcagcggtctcgggatcgatggtgacggtgtaggtctttgtataggtgtaaacggtcttgccgttttctcccgttcctgctgcaccagagagttcccacttatatacaccgttttcagaggtagaagtgaaaccatcgggggtgccgttcttaaatgtcacaccggcagggagcctgtcggtcacagtaccgctgttcagaccgctgacgatggtgtcggtgatcgccgtaaaagcggccatcagaccctcagtgttgtcggcatcgtaggcgtaaatcttgccgctcgtcggcgatgtggcgatcttgtttttcagatagtcgccgaccgaaattttcgagtatatcggacgccccaagaaatctgtgccggttttatcatcgtaattcgtaatcttctctccgcttgcaccaaagcagacggtgtagaccgatgcgctattctttaagtccgttgcggaattcttggtattttggaaagtatccttgtcgcagctcgagccatcacctgcgacatcgtacttgtttcccccaatcgtgatatcaggagacggattaaaaaagctatagctccaatcttggagataatatgtcggcttgccatcggtaaggacaacaacgttctttaaggatttgtcaatatttttgactgtatcctgcttcagctgatcgtctgcgaacttcagaccgcaatcaaggtttgtagctttctcagccttccacttggatgtgtcagttgccttctgatatgcatccttattggatacatcgagccattcgcggccaccaaccacaccgccagtctcattgaaccagacaaggcacacccagcgaccaaggttcagattatccgttgtcgtctctttgccgttcttatcaaaacgcccgctataggtcgtgataaaactcagggctgccttcgtagctgcggccatccggctctgcgcattggttacattattttgataggccttatagtggacgcaggtgctatcatggtaatatgagttatcgaaaaggctatcactcatggtactcttgcaggacgcgcagccattcatagaaccagaatgatccatcaccagcacagtcgcggcggcgccgggcagcgtggtcgatgttgtctgttccagctcgactttgagcgtgacctcataggtgttgtcgccgacacgcttagcggtcttgctgacggacttcacacccgtaataccggtgatattatttgtgccggtaccattctcagttgcagtccacttgccatccttgtcaatcgtaccgtatttcacgttgccactcgacgctgtctcttccgccagcacgttgagcggcaatagcgacagcgtcatcacgaggaccaggacccaggtgagaaggcgcttgccaactttcttctcagacataaaaaaatcctccttcttctgcctgtacggcgcgaagaaggggggaggtgatctgcatttggcaaccggctgccgtgcggcgcaagcgccgtttaggtccgtggctttgcgacacaggctttcgcctgctgtgcctttttctgtacagttgctcttctgcgagccgcacagatatttgtgtttgccaatattttatgttcacagtataccagatttgcccaaaaatgcaaggcgattttcaaaaaatatataagatattaacagaactaataccgcgcagaaaaaaacggcggcaaggaatacctgccgccgtgattcgacgaattgtgaggtcttacgccaccgcggacacggcgagcgcgtcgctctgctgggagtaggtcaggggggagacgcagccggcgaaggtggtctcgttgatgacgcgcttggtgacggcgtaggtcatgtcgatctggtaccagttgccgctgacgttgaccttgttccaggcgtggtagctgctgccggcgtagcccttggtgagggtgcaggggatattctggctgcggcacatggcggcgaagagggacgcgaggtcgtagcagatgcccttgtcgctgttcagggtggcggcggtgtcggggatgtacttgctgaccttgccggaggtgatgtcgctcgcgagcttggtgtcgtaggtgtagtgaccggcgatgtagttgtagatcgcggtgaccttgtccatgtcggtcttggcgtccttgcagagcgcggcagccttcttgcacacgtcgtcgccggaggtgaactgcacgtcggtcgtggcgatgaggtaaggggcgtaggcgttttcgatcttggcgttgacgcgcttgctggtcacgacgcggtaggtcgtgccggagatgttctcgcagagggagatggtgtaggtgccgtcgccctgctcgagggagaagacggcgtccttgccgctcgggcagtttttgtaagacgtcttttcgttgccgtactggatgccgaccttcaatttggcattggaggtgtagttgacggtgacgaaaccatacttggcattcgtggtgtcaatggtggtgccattggcagcgctggcgttcacaaccgtgaacatggacatgacaataagcactgcgagcatagcgcaggcatgacgaaacagccgtttcatacggcgatctcctttcggtaactggctgccagccctgttcccaggggtaaggccctatagctttgcgtcgccggttttcaccgggtttgctattatcgtttgagatgcggtcgaagcggctgcacctactctttttttacatgtgcatcatatgcctccgttcgacatttgtcaacagataatttagcggtttctttattttttcgaaaaaaattggaattttgtcaataccaacgcagaacgcgttcaaaattcgttcatatttagcggaaacgccacttgccaattgcggcgccgcgtagtatgctcgtaaaaatcgcaaacgcgggcctcaaaatggggcaggcgggcacgggaaaagaaaggatacgacacatgaaagtaaggaaagagaaaacactggcaacgaaaatggccatctccctggttgcgggactgacggccggtctcctgtttttgttcctccgcgagcatttgaatgcctccggacaggaagcggtgtgggcgaccatcaataatcttttattccaggatatcaccgctgccggagcgagcagcgcgcttggccttttctatttggccggtcagatgttcattcgttccctccagctcgtcatcgtgccgatggtgtttacttccattacattggcaataggacagatctctgataccagtacacttggcagaatttccttcaagtgtatcaagggtttcctgatctgttctttttttgcgctcctgctcgcctgcgtctgcggcatcgtcttctataacatgggcgtattccacatcgccgtcgacgggctggagagcgtttccggttcgacgggctccaatccgctgctcgttgtgctgaacgtcatcccctcgaacattgcctcgacgttttcgagcaacacggcagtgctcgccgtcgtcttcctcaccatcgcgctgggcctttgcatgaagacgctcggcgaggagaagactgccacgcttcgcaagctcattcaggaactcaacgacgtggtcatcgtcttcctcaacttcgtggtcagcaagttcggccccgtcgctatcttcatgctgctcacgcgcaccttcgcatcctacggtgtggagcacctcaagccagctgtcgcctacgttatcctcacggtcgcgctgctgctcatcttcctcatcatcggctatcccgctttcatcgcgatcttcgcgcatcttgatcctttcaagttcgccaagaagatcacccgcgtcgcggtcttcggcttctccacctcttcgagtgcggcgacgctcccgctcaacgtcaagaccacggtcgaggagctcggcgtggatgagaagatcgcctccttcgtcctgccgctcggcatgaccatcaacatgaacggaacggccatcatgcaggtcatcgcaacgctcttcatcgccggctgcgcgggctacagcatcagcttcacccagctcgtcgtcatcgcgctgctcgcactcatcgcctccgccggtacgcccgcggcccctggctccggcgcgatcatccttttcaccatcctctccggcctcggctatgtgaatgatgcggcaatgctggcctacagcctcatcctcgccatcaaccgccccatcgagatgctcgtcaccgcgctcaatgttgtcggcgattccgccacgagcatctatgtcgccaagtccgagggcgtgctgaacgaggacgtttacaacgcgtaagatcattcaaaaaagtggtgtcaccactttttttgagaaagtttcgcttcgctttgtgcctcgcgggctcgacacacgctccgcgcagagtgtcttttctgacgcgcgtgtcgccagaaaaaacgatccagatcatttgccgcctgcgggcggcaaagtctgcgatgcttttataacgaaagagacgcggcgaaagccgcgtctctccttatattataggtgttatctgttacacgctgagccagtcgtcgaggataagaccctcgttgtgcttggtgagaaagcccacgctccactcgccgccgaaggcgatgagcttgcggcccttgaagtcctcgagcacgcgcgagccggagcagagcatcaggtccttcacgtcgcacgggcactcgcggatcaggcgcaggtgctcgtagggaaggccgctcatgcgcaggtcgacgccgtactcgtttttcatgcggtactcgaacacgtcgaactgcagcgtgccgaccacgccgacgaccacgtcctcaaagccgctgtcggggattttgaagatctggatggcgccctcctgcgcgatctgctccacgcccttgacgaactgcttgcgcttcatcgtgtccttgggtgagacgagcatgaagtgctcgggctcgaacgtcgggatgccggagaagcggaactttttgccgggcctcgtgatcgtgtcgccgatcgagaagatgccgggatcgaacacgccgatgatgtcgccagcataggcctcgtcgacgatctcgcgctcggcggccatcatcgtctgcggctgagaaaggcgcatcttgcggccggactggacgtggaaatactcggtgtcacgctcaaacttgcccgagcagatgcgcatgaaggcaaggcggtcacggtgggccttgttcatattggcctggatcttgaagacgaaagccgagaattcaggggagtagacgtccacctcgcccgcgtcgctcacacgcggcagcggcggcgtggtcatctctaaaaacgcgttcaaaaacggctcgacgccgaagttcgtcagcgcgctgccgaagaacacgggggagagcttaccgtggcgcacggcgtcgaggtcaaaatcgcggcccgcgccgagcagctcgacctcttcggcgagcgtatcgcggcgggcctgaccgatcaggtcgacgagcgcgggatcgtcgagctcgatttccgtgatgcccgcctttttggcgtggcccgcgtcggtgaagtgcaggatgcagcgcttatcgcggtcgtacacaccggcaaactccttgccgcagccgatcggccagttgacgggataggtgtcgatgcccagctcgcgctcgacctcctcgcagagctcgagcgggtcgcgcgtctcgcggtccattttattgataaaggtaaagatagggatattgcgcagggcgcagaccttgaagagcttgcgcgtctgcggctcgacgcccttcgcgccgtcaatgaccatgacggcgctgtccgcggccatcagcgtgcggtaggtgtcctcggagaagtcctgatgtcccggcgtgtcgaggatgttgatgcagtagccgccgtgctgaaactgcatgacggacgacgtgacggaaatgccgcgctgcttttcgatttccatccagtcggattttgccgcgcgctcgcgcttgcccttgacttcacccgcctgcgcgatggctccgccgtagagcagaaacttttccgtcagcgtggttttaccggcgtccgggtgcgaaatgatcgcaaacgtccggcggcgggagatctcttcctgtaaagtggccatgactgcctcctgaaaaatacgatttaccgggcaagtgtatcacagccccccacattttgcaacagaatcctaaaatctatgcttgacaaagcgaaaaatgtctggtatagtacatcttgttccgcgggcgtagctcatctggtagagcgccaccttgccaaggtggaggtagcgagttcgagcctcgtcgcccgctccaaaaaagaggtcacaacgtatgttgtgacctcttttttggattccggcaggaaattgaaatgctcgggcgaagtgaattcgccctccgccaaggttttgctgcgcaaaacgcttgtacggcgcaaaagcgccgattttttggattccggcaggaaattaaaatgctcgggcgaagtgaattcgccctctgccaaggttttgctgcgcaaaacgcttgtatggcgcaaaagcgttgttttttgcttcggtaggccaaatagatacgggacatccgaactgagtgtcctgttttttataagaacgttccctgtcaatgattgaaaacaggtttttaatttgctatgataccttcacactttccatagggggataatttgtgaaaaaaagatttgctatatgcagcacaatagttttgctgctgcttttgtcagcctgcggcgcaccgcagacgttggacttttcctacgctccggaaggagaagaactttcttctttgatggtggagacttcacaaactcaccgtgcagaactggagcacgttccctctgcggctgattttgccgatgcgatttcggatgaccccgcctcggcagggctgctgagcgagagcgaggtggagagccttttacgaggtcatgccgcgatggagacggtgtcgaaggaacaggcgcagtctgatgtttccctgctgttccgcgcgctgcaaagcgcttacggcgcttacgaatactttgggcaggaaaagtttgacgcagcggaggacgctgtgacacaatggctttcctcacaggatgatgagattaaagtttctgcgctgggagaaaaactgcaggaatctctcgcattcatgcttgcgcacgacgcgcatgccgtgatttatgaaccggcggcggaagagatcgaggcgcaggtgcgatatgaatacttctttgccgacggcttctatttttcaaaggatgtcaacggcagctattatatagtgaatgacggggagaggtggacattgagtagcttctccgatgaacatgtcagcgtgcagccgacgcttctgcaagacggacgcattgtttatcagccgacgctttttgcgctgcggaaggacgccgtgcagagcagtgtcacactgaaaaattcttctggaaaagcgaaaatctatcgccttgactggacggagagtcagccgcttgatgttgacctcggcacgctggattaccgcctgatacaggaagacggtcttacctatgtttccctccgcagctttgtttccggcacatatgataatatgcttgcacgctatgctcgggaaggggaaaaagcacgcgggagcaaagcggtgatctatgacctgcgcggcaatgttggcggctcggatagttggccgagaaagtggatacagagtttcctcggaacgcagaacagtattgagacctccatgctgtatgcgcagaaaaacagcgccctttttgctgcggaaaacagcgagagtctgctgccggaagatgagggaacttgctttgcccgtgaagtccacgggacctggtatgaaaatgatattccgatcatcgtgttggttgacgatcattgcggctcgtccggcgagggcgcggtacagcttttgaaaacgcttgacaatgtgctcattgtcggcagcaacacggcgggataccagctctgcggaaatatcagcacctttacattgccgtataccggcatcggtgtgcgctttggggcaacgcttttcctctatggggacggagaaaatgtcgatcacaggggctatgctccggatatctggtgtgatccgcaggatgcgcttgcttcagtgctggcactgctgaaagaacagggggtcgtcagtgcagatgcttgcgaaaccgtgagagaaaaaatagtgaaatgatgaatttttcgctcatacaggcagagcggcagcgggtaatagaagcaactcaaatcgtatagcacccacacttggcaggcattcgattccgcaggctgcgcagatcttcaaactgcaaactgccaatgtcgggggtcggggggaactcccctcgcgttctcttgggggggtacaagggggcattctctcacgcgagagaatgccccctctttttctgcgtccctgcgcggccacagggggagaacctcagcgtcccccttgcgcagcaagcccctttcatgctatgatattttcacagaaaaagagaaagtgaggagatcatcatgactctcgatgaagcgatcaagtccctgatggctttgcaggccaagctcgcggcctacggccacgccatgggcctgctcttttacgacggcgcgaccaccgcgcccaagggcacggcggcgaaccgcggccagaccatgagtattttgagcgaggagcactacaagctcacgaccggtgaagagaccgtcgcgctgctcgaattcctcgacgcgcgcaaatctgagctcgacgaaaagcagcagcgcatggtgtttttgctcatcaaggacatccgcaatatgcagaagatcccgatggacgagtacgtcgcctaccagcagcttttggtcgaggcggacgacgtctggcaccgcgcgaaggagacgagcgactttgctctcttcgagcccgtgcttgagaaaattttcgagaccaacatccgcttcgcgcactactgcgcgccggaaaaggacccctatgactactggctcagcgagtatgaggacgggctgacgatggcgcagtgcgacgaatttttcgcgacgctgcgcgagcacattgtgccgctcctgaagaagatcaaggcgcagccgcagctcgatgacgcgatgctgcacggccattttcccgaggagaagcaggcgcagctttccgactacctgatgcgcacgatgggcctcgatttggaccatgtcggcctgtccacgaccgagcatccgtttacgacgtcgctcggctcgcactttgacgagcgtatcacgacgcactatttggaggagaattttgcctcctcgatgttctccgttatccacgagggcggccacgcgctctatgacaccggcagcgcggatgatctcgcctatacggtgctcgacggcggtgtctccatgggcatccacgagagccagagccgtttctatgaaaacctgctcggccgctcgcgcgccttcacgggcttcgtgttcccgaagctctgcgagttgttccccgagctgagcggccacacggcggaggaattctaccgcgccatcaacaaggcggagccgtccctcatccgcaccgaggccgacgaggtcacctacagcctgcacgtcatggtgcgctacgagcttgaaaagcgcgtgatgcacggcgagctcaaggtacacgacctgccgggcgagtggaaccgcctttacaaggaatacctcggcgtcgacgtgccggacgacaagcacggcgttttgcaggacagccattggtcgggcggcagcatcggctacttcccgtcctacgcgctcggcagcgcctacggcgcgcagctgcttcgcaagatgagagagacgatcgatgtggacgagtgcctcaagaccggcaattttgcgcccatcaatgcgtggaaccgcgagcacatctggcagtacggctgcctcaaaaagcccggcgcactcttggagcaggcgcttggtgaaaagttcgacccgacggtctacacgcagtaccttgaggagaagtacggcgaaatttacggtttgtaagagtggaatagcatcaaaaaggcggtatccgaccggatatcgcctttttgtgcgtgaaacgtggaaagtccattgcattgtaaccgtatttccgatacaatgggcggagagagaagcgggtaacgagcggaggagagaccgcacgcccgcaatgagagatgggagagcaaaaatgaatactgcgctgtatgagacctacgttcagattttgcatgaggagcttgtacccgcgatgggctgcactgagcccatcgccgttgcctacgcgggtgcgcttgcgcgccaaacgctcgggatacttcccgagcgcatcgagctgaccgtgagcggcaatatcatcaaaaacgtcaagagcgttatcgtgccgcacaccggcgggcgaaagggccttcccgtcgcggtcgcggcgggagtacgcgtcggcgatgccggcgcgcagttagaggtgttggcaaacgtgacggaggagcagcttccgctgctggacgagtacctttccgcggcggagatcacggtgagcaagtcgccgctgagctgcccgttcgacattcaggtgcgtgttttcgcaggcggggatacggccttcgtccagatcgtcggcagccacacaaacgtcgtgcgcatcgagaaaaacggcgaagtgctgctcaacaagcccttttccgaggaggcggcccagccgcccgagagccgcaggagcctgacggtcgaggacattatcgcctttgccgacgaggtcgatttagacgacgtccgcgcgcccatcgcgcgccagatcgaatataacacggccatcgctgaggcaggattgacagggcagtacggcgcggccatcggaaaaatcttgctcgattcctatggcgacagcgtgcagaaccgcgccaaggcgtgggctgccgcgggctcggacgcgcgcatgaacggctgcgaaaagcctgtcgtcattaactctggcagcggcaatcagggcatgacggcttcgctgcccgtcattgtctacgcgcgcgagctgaaagcgagcgaggagcagctctaccgcgcgctcgtcgtgtcgaatcttgtcaccatccatctgaaaacgggcatcggcagcctttccgcctactgcggcgcgaccagcgcgggcgcaggagccggggccggcatctgctatctgtacggcgggcgctatgatgagatcgcccacacggtcgtcaacgcgctcgccatcaactccggcatgctctgtgacggggcgaaggcgagctgcgcggcgaagatcgcctcggcggtcgaggcggggcttctcggcatgcagatgtaccggcacgacagccagttctacggcggcgacggcatcgtcgtcaagggtgtggagaacaccatccgcgccgtcagcagcatcgcgcgcgacggcatgcgcgagaccgacaacgagatcatccgcctgatgatcggggaggaaactgtcaaatgaagatacttgtcacaggcttcacgccgttcggcggggagcagatcaacccctcgtgggaggcggcacgccggcttcccgaccgcatcgggggagcagagctcatcaagcatgaaattccgacggagtttgacgcctccggtgctgcgctgcacaaacttttgacggagctgcggcccgacgcggtgctctgcatcggccagtacggcggcgcaaattgcatacgcgtcgagcgcgtggccatcaacctgcgcgacgcgcgtatcgccgacaacgcgggtaagcagccgacggacgagccggtcgtggccggaggtccggacgcctattttgcgacgatcccgacgcgcgagatcgtcgacgccctgcatgagcaggggattcccgctcagctctcgtactccgcgggcacgttcgtgtgcaacaatctcctttactgcgccctgcacgagagcgcgcagagctatcccgccctgcgctgcggctttgtccacgtcccctacctgcccgagcaggcaaaggacggcaatgcgccgagcatgagtcttgcgctgatgaccaaagcactggagatcgcagcggaagtgatcgcgggggaggcacaacactgagaagagtatgttctcctctgaacgagtgttctgttcagatgctgcggtgaagagatgtagtgaatatgctgaaatgactatttagtgcttgaagcatacgaatacatgcgttgtactctgcacaagcacgacttgcggaggcttatgttgaagcgctgcgccatacagaactgtatgtcgattataaaataatgcggcaggcgaagataagaagccgacaggagggggaacaaacatgaaaattgtagtactggacggatatacggaaaatcccggtgatctgagctggagtgagctggaaaagctcggcagcgtgacggcctatgaccgcacggcctacgcggagtctccgctgatcgccgagcgcatcggtgatgcggaaatcgtggtgatgaacaagacgcccatctcgcgcgaaacgatcgacaagtgcccgaacattaagctcattgccgttctggctacgggctacaacgtggtcgattacaactatgcccgcgaaaagggcatccccgtcgtgaacgtgccgacctacggcacggcgtcggtcagccagttctctattgcgctgctgctggagatctgccaccatatcggtcatcacagcgagagcgtgcacgccggtaattgggcgaacaacgccgactggtgctactgggactatccccttatcgaactggagggcaagacgatcggtatcatcggctttggccgcatcgggcaggcggaggggcgcatcgccaaggcgctcggcatgaatgtgctggcctatgacctttttccgaacgactccggccgcgagatcgcagagtacgtcggccttgatgaactttatgcctgcgcggatgttatcacgctgcactgcaatctcacaccggaaaacaccggcatgatcaacaaggagagcattgccaaaatgaaggacggcgtcattctcatcaacaatgcccgcggccagctcatcgatgagcaggacgttgccgacgcgctcaactgcggcaaaatagccgcggcgggactggatgtggtctacaccgagccgatccgcgcagacaacccgctgctgaaggcgaaaaactgcatcatcacgccgcacatctcctgggcaccgaaggagagccgccagcgtatcatggatgctacggcggaaaatatcagggcgttccttgcgggtgctcctgtcaatgtggtcaatccgtaagacaggatatcctttgccggaaaacataccatataaaaattgatcagaaaaagcgacatcccgaattcgggatgtcgcttttttagtcgtggagggagagaaaatcaaaggccgatatctttctggatgagatcgcgcgtttcaaagagcagaggcaggagctgctggatgtgctcatcggtcatcagcgacttgagcgaagaaagggtgatggcgtagtgatcatcattgtagcggtcgtagagcgaaacggcaatacaggaatagccacaaaggacgcgacgcagcggagcttcacaggatgctttccgcatggggtgcgattgccgccaagctgaaagcgggggagatcaccaaagaagaatatgaccgctggcgctaccgctaccctgaacttgacacctccggtcagtggcacaagatcacgccgtcgcaggagctgagtgacctgctccttgctgatctcaaggaacatagcgaagaataacaaaaggctctgccgaccttcttttacagaaagtcagcagagcctttttcgctctcaatataggattggatgcgacagcaaacctgcaaaccattcgctcgccaaaacaagaacaaacaaaatggctttggtatctgctatcattttgctatcaaacaggaaatgagattttcaaaaagtgagtgttttcaaggcttttcagcccctcatattcacttttttctcattcccactccaccgttgcggggggcttgctggtgatgtcgtagacaattctgttgatgcccttgacctcgttgacgatgcggccgctgatcttgtcgagcagctcgtaggggatgcgggcccagtcggcggtcatgaagtcctcggtcgtcacggcgcgcagcgcaagcacgcggtcgtagctgcggccatcgcccatgacaccgacggtgcgcgtgtcggtcaggacggcgaagtactggttcatcttcttgttttcgcccgctttttcaagctcctcgcggtagatcgcgtcggcaaggcgcagcgtgtcggccttttccttcgtgatctcgcccatgatgcggatggcaaggcccgggccggggaacggctggcgggagacgaggtattcgggaagccccagctcgcggccgagctgacgcacttcgtccttaaagagcaggcgcagcggctcgatgatctccttgaagtcgacatagtcaggcagtcccccgacgttgtggtggctcttgatgactgcggcattgccaaggccggattcgatgacgtcggggtagatcgtaccctgagcgagaaagtcgaccgcgccgatcttcttcgactcttcctcgaacacgcggatgaactcttcgccgatgatcttgcgcttgcgctcgggatcggagataccagcgagcttcgagaggaagcggccctcggcgttcacgcggacaaagttgatatcccacttcttgaacgccgcctcgacctcgtcgccctcgttgaggcgcatgaggccgtggtcgacaaaaacgcaggtgagctgggggccgacggcctcggccagcagcgccgccacgacggacgagtccacgccgccggagagcgccagcagcacgcggccggagccgaccttttcgcgcacggcggcgatggcagtatttttatagtcgcccatcgtccagtcgcctgtcgcgtcgcagacctcgtagaggaagttgcggatcatcgcggtgccgaactccgtgtggttgacctcgggatggtactgcacgccgtagaacccgcgcgtttcgtcgcagatggcgacgttcgggcaggcgtcggagtgcgcgacgagagagaagccctcgggaacgacctccatgtagtcgccgtgactcatccacgtcacgctcttttcgggaagacccttgaagagcttgcagctcgtgtcaaaaaacgtctcggtcttgccgtattcgcgcgcggtggcgtcgtttgcggcgacgaccttgccgccgaggtggtgcgcgatgagctggcagccgtagcagatgccgagcacgggcacgcccgcgtcaaagagcgcgggatcgacgtgcggcgcgtcctcgagatacacgctgttcgggccgccggtgaagatgaagccgatgggattcatcgcgagaaggtctgcaagcggcgtcgtgtagggcttgacctcgcagtaaacgccgcattcgcgcacgcggcgcgcaatgagctggttgtactggccgccaaagtccagtacgatgatggtctgatggttcatattgaaattctcctgccgtatccaataatatggtaaaagcatcatatcatagcttttcccattttaccagcggtattgtaaaaataaaaaggtcgcgcggtcaatggaccgcgcgatcgagggaggccgcgacaaagccgcggaacaggggatgcggcttgttggggcggctcttgaattcggggtggaactgcgcgccgacgaaccaggggtggctcttcgattcgacgatctcgacgagcgtgccgtcgggggagagaccggcaaggcgcatgccggcgtccgtgaagtcgtcgcggaagtcattgttgaactcgtagcggtggcggtggcgctcccagatctcgggcgcgtcgtagagcgcgcgggagagcgaaccctcttcgagcacgcagggatacttgccaaggcgcatcgtgccgcccttggctgtcacgccgacctgctcgggcatgagcgcgatgacgggatgcgccgtcgtggaggagaactccgcgctcgtcgcgtcgtcccagccgagcacatggcgcgcaaattcgatgactgcgatctgcatgccgaggcagatgccaaggtatgggatgccgcgctcgcgcgcgtactgggcggccaggatcatgccctcgatgccgcggtcgccaaagccgccggggactaagatgccgctgcacccgcagagcttctgcgcgatgttgtcgctcgtcagcgtttcggagtcgacccattgaatttcgacgctcgcgtcgcaggccgtgcccgcgtggaagagagactcaacgacgctcaaataggcgtcgtgcaggccgacgtatttgccgacgagcgcgatgcgcacgtggcggtgcacgccgtggatcttgtcgaccagcgcgcgccactcggtcatgtcaggttcaccgcagtcaaggtgcagcttgcggcacaccacgcggcaaaggccctcgtgctcaagcagcaacggcacctcgtagagcgtggacgccgttgcgttctggatgacgcagtcgggctccacgttgcagaagagcgcgatcttgcggcggatgtcgtctgtgatgggctcatccgtgcgcacgacgagaacgtccggctggatgccctcgctcaggagctccttgaccgagtgctgcgtgggcttgctcttgagctcgccactgccgggaatggtcacgatgagcggcacatggatgaagagtacattttcgcgcccgcgctcggccgcgacctgacggatggcctctaaaaagggctgactctcgatgtcgccgaccgtgccgccgatctcggagatggcaacgtcggtctcgccgtcgtccatgtcgtagatgcggcgcttgatctcgtcggtcacgtgcgggatgatctgcaccgtgccgccaagataaccgccctgacgctcgcggttcagaacgctccagaagattttgcccgaggacacggaggatttctcgtccagcgcctcgtcgacaaagcgctcgtagtggccgaggtccaggtcggtctccgcgccgtcgtccgtgacaaagacctcgccgtgctgatacgggctcatcgtgccggggtcgacgttgagatacgggtcaaacttctggtttttgaccttcagcccgcactgttttaagagccgaccgagcgacgccgcgcagatgcccttgccaagccccgacaccacgccgccggtgacaaaaatgtacttcatagatttttcttcctcccctgtcaaagaaaaatgaaactgctgcgataaagcaaaactccacttcaaaaaggacgctcgaaagagcgtccttttgacttttacacggagaagagtaattcgcagaacgtcggatacggccaatacttggacgcggtcagcacttccagcttgtcgacggtcttgcgcacgtcgttcgtgcgctcttcgacctcgtcgtggtagtagcgcaggagcgtttcgggctcagcgttgtcggagacggtctcaagcgccgtcttgaggctgatggtctcttcgagcagctgctcgttgagcgagccgatggcgttggcaagcgaggattcgacgtggcaggtcagctccggcgcggcggagcgcttggcggcgatggtgccgcacagcgcggcttcgtactcggaagcggcgttgaggatgccgtgctggaccatatcgacgagcgtcgcggcctcgatgcggatgaccttgcagtacttctcgatatgaacttcgtggcgggagtgaatttcttccttgctgtaaacgccctggcgcgtcagcagctcaatgttcttgggcaggatgtaggtcggcagcgcctcggcggtgttgtgcaggttggcaaggccgcgcttttcagcctccttgatccaagcctcttcatagccgttgccgttgaagatgatgcggcggtgggcggagaacgtgtcgcggatcagcttgtggagcgcggcagtgaagtccggtgcgtccttgagctgcgcgtagaattcgtcgagctcttcggccatgatggtgttgaggatcgtgaccgggcccgcgatggactgcgaggagccgggcatgcggaactcaaacttattgccggtgaaggcgacgggcgaggtgcggttgcggtcggtcgtatcctgcgggatggcggggagcacgtccacgccgatgcgcagggacttgtgctcgggcgcggtgtagtcgttttcaccgacgatggcgtcgatgataccctcaagctcggtgccgagaaagacggagatgacagccgggggcgcttcctgcgcgccgagacggtgatcgttgcccgcgaaggcgacggagcagcgcagaagctcctgatactcatccacgcccttgatgaacgcggcgagcaccagcaggaacacggcgttctggctcggcgtcttgccgggggagaagaggtttttgccagtgtcggtcgagagcgaccagttaacgtgcttgcccgagccgttgacgcccgcgaagggcttttcgtgcagcaggcacacaaggttgtggcgctcggcgacctttttcatcgtctccatgacgagctggttctggtcgctcgcggtgttggcgtcggtgtagatgggggccatctcgtgctggccgggggcgacctcgttgtgcttggtcttggagagcacgccgagcttccacagctcttcatcgagctctttcatgtaggcggccacgcggggacggaacgcgccgaagtagtggtcgtccaactcctgacctttcgggggctttgcgccgaacagggcgcggccacacaggcgcaggtccatgcgctttaagtacagctcgcggtcgatgaggaaatactcctgctccgcgccgatctgcggcgtgaccttttccgcgtcgtcgccaaataacttgagcacgcgcaccgccgcgcggtcgaccgcggccatggagcgcagcagcggcgtcttcttgtcgagcgcgtcgccgctgtaggagcagaacaccgtcgggatgcaaaggctgccatctttgatgaaggcaaacgccgtggggtcccaagcgctgtagccgcgggcttcaaacgtggcgcgcaggccgccgttggggaaggaggacgcgtcgggctcgccgcgcaccagctccttgccggaaaagtccatcatcacgcggccgccgccggcgttgttgataaagctgtcgtgcttttccgccgtcacgccgctcaagggctggaaccagtgcgtgaaatgcgttgcgccatgctccagcgcccaggtcttcatcgcgtcggcgatctcatttgccgcggaaaggggaagaggctgcccgctctttaagcagccgcgccaaacgtccatggcgctctgcggcacatactgctccattgtgcgttcattgaacaccagagagccaaaaagctcgggaatgcgagtcgcttcactcatgatccagacctcctgtttcgaaataaaaaatttgataagtaatgatacttcatcggggcaagcagcgtcaatactttgtttttccaactttcccctcactttagtgagacgggatgtgcggtgtgaacgaaattatgaaagtgcggcaactttttcttgcatgaagaaaacggctgtgctatatttagcctgaaccctcccttgccggaaacggcaggggagggcattatgcttatgtgctgcgttgtgaaaaaattttgcggacaaaaaagaaaacgggacgtgaacgccggtcacggcgtttgcgtcccgttttgcatcacttgatcgtggcgctgtcgttcagcacgctcgtgctgtaaaggaacagcacgtcctgcgcggtaaagtcgatgaattttccgagcattgagggggagaggtagcggatgtcgacgagcgtgatctcgctgtacccctccgcaagcagcggaagcaaactcgcggcaaacgaatcgcggaagacgagaagcttgcgccccgcctgcgcgttcgggttctcaatgcgcagcagcgacttgggtcccgagaggaaaatttcatacgggtcgctgccgtctgccttttcgagcgtgtagacagggagataggagccgctttcatagtcgtacacgcgacagctaccaatgatatcgtttgtgaggtaggcgagcctgtcgggctccattggcagtgccgactgcccgcggtacacaccgtaaaacggcgtatcgagcgtgacctcggtaaagtccacggtgagtgagacgcccatcgcatctgccagcgccttggccgtgggggcaagcatttcctgccgccagtggaggtcggtgcggtaataggatgagagcgacagcgtgcccgtcaggtcgatatagtccgcaaaatcgaccttttggcgcatgagcgcaaagaacttctcgtaatccatcgcgggatagccgttttcggcggccaaaaagtaattcttgtcggggatgacggagaggtagacgtttacgcccgtatctttgagatacgtttcgtacacgtagcggaagcggtcggccgcgtggtcgagcgaatcctcgtggatcgtgtcgtcgagcttcgcggcgtagccgtccgcgacgtagatgccgttgttgtctttctcgccaaataaatcgcggacggacagggccttgagcgtgcggagctcgtcgcgcagcgggaactggtcgagcgtgtagctctcaaagttcgactggaagcgtccggagagtacttcttccacattcagcgttgggaactgcttgagcgggcgacgctcgctttccgacacggcgtcgtcgctcttgcaaatgctccacagcgcgaacataagcacgaacgctgccgcgatgccgagggtgagggcgtctttgatttttcgattcatgcgatgccctccttaaaagcggaagtagaggaacgggttgaacgacccatccactaaaaatgccgtgccgaacagcagagggatgagcacgcagagcggctcgagcacgtcgagcgccgtcgctgcgcctttggatttgcgcagctttgcgacgatcatcttcggcagcggtgttgcgcagaggataccgagcacgagcaacgggccatagcttttaagatagtagaccgcctgtgcgctcgatagcggcagaccgcctgcaccaaacatcgcgccgatgcgcgagaccgcctgcgcggcgctgtctgcgtcgaaaagcacgaagccgagtgtgacgaaaaagagcgtgtacacatggccgagcacgcggtgcttttcgagcaccggcagcagcgccagcttttcaagaagcagcaggaccgcgaaccacagtccccacagcacgaacgtccacgccgccccgtgccacaggcccgttgcgagccagacaatcagaatgttcaacagctgacgcgccttgcccttccggctgccgccgagagggatatagaggtagtcgcggaaccacgagccaagcgacatgtgccacctgcgccagaactccgtgatgctcgctgaaatataggggtagttgaagttttcagggaagtggaagcccagcatccgcccgaggccgatggccatatcgctgtagcccgaaaagtcgaaatagacttgaagcagaaacgcgagcgcgtagagccagacgaagagaacgctcgcgtcctgcgtcgacttgtaggcgctcgcgagcgcaccgaactggttggcgagcagaattttcttggcaaagccgaccgtaaagcggcgcacgccctccgccgcggcggagacgctgtgcgtgcggcttttgagctctgcggcgacgtcggaataccgtacgatcggccccgcgatgagttgggggaagagcgaaacataggcggcgaggtcgatgaaattcctctgcgccgccgtttcgccgcggtagacgtcgatgacgtagctcaatacctgaaaggtgtagaagctgatgccgatgggcaggctcagcttcaaaagcggcagggagaaccctgtgacggcgttgacgctggagagaaaaaagtccgcgtacttaaaatagccgagaagcccaaggctcacaaggatcgagagcgtcagaaagaccttcgatgccttttgcccgcggtgcttttcaatcagcaggccgaaaccatagccctgcacgatggagacgagcatgagcagcatatatttcggctcgccccaggcatagaaaaagaggcttgcgagcagcagcaccgcgtttttcagctgccgcggcgctgcaaagtagatcagcagcgccgcaggcagaaagtaaaagagaaagggaacgctggaaaagagcataaacttctccgcctttcagaagatcaaatcaggcgatggcctcgtcgcagacgacggcagcatcggcaaaggcctcggtgaccttgccgctgaactggtcgacgaggtcctccgcgccgtagcaggagatgacatagtcgccgagcgtcaggatgacaagcttgtcggggaagccgcacatccactggcggttcatgatgttgtccttgaggtcggagacgaccgcgtcaacgtcgggggtattcgcaatgtggaacgcgcccgcggtgaaggtgttggcgttcatcatgtgggtgagggacgcggcgtcggagagcttgcctgcgtccgcggcggggaaggagagagcgtagtcaagtgcatctccgtcttcgacggagaagttgccgggcgcgtcctcggtcatattcgcctcatcaaagtcgccgccggcagcagggaacttgtcgtcgtcgctgtagttggcccatacggcgttcagcagctcgagagcgctcgcgggctggctgttattgccgctattgtcatccgtcttgctgccgcaggcggcgagggagagagtcatcgctgcggccagcagcagggtgagaaactttttcatgggaatttacctccaaaatgttgtgtgttgtcaatagtaatgtggaatgggatgcttacgcccgcgcggcggcccaatagccgttggcctcgtcgtagcgcagcgtgacggcgggcgcgccgtcgagagagagcgtgtaaaccgtacccgtgtccggctcttcgatggtccagcaaagctgcaccttgccggagacggtgtaggaggtgaactcctcctgcagcgagtaaagaggctgggtcagcacgccatccgacaccgtaacggtcacggcctcgcccgatttgctctcgatggtgagcatcggactgagcgggccgctcagactgccgcgcgcgtcgagcgccatcggggtggcctggctgatggggatagccctggaagagagcgctgcgccttcgaccttgatctcagccggtaaggcgtcgcgcgtcatcgccagggcggcggccagcacgagcacaaggcacgccgcagcggcaagaaaacgcgggagggcgtaccgtttgcgcggcttgtaggcgtaggcgtccgcgatgagcccgtcgtcgagctcgcctatggcgcgggtcagaacttcatgcttcacagtatccctccttgatgagatgctccttgagctttctgcgcgtgcgcaggagcgtggttttgatgcggctctcgccgcagtgaaagcgcgcggccagcgcttcgaccggttcgcagtagaaatagcgcaggatgaacatgctgcgcacctcttcgctctgcgtgcgcagaaacgcgctgatgctgcggccgagctctgctgccgtggcctcgtcgtcgggcgaggacagggcgggtgcgcagtcgtccagctcgtcgagcgagagcgcgaaggcgtcgccctgccgcttctgcgccgacctcgcattatagcggttcagcgccagattgcgcgcgatcttgccgagaaaggcagacagaatcgcaggcctttgcggcggcatggcctgccaggcgtgtaagtacgtgtcgttgacgttttcctcgctgtcggcgcggtcggataaaatgttttgcgaaattttcatgcaatagctttcgtatttggcggcggtggcttcgatggcgtgctcgtcccgctgccagtataggtcgacgatctcatggtcgtccataggctcgctcctttctgttgtctgccatcatggggaaaagacaacttttttgccgtttgcgttacacaaaagagaaaatatttttgaaagtataccacattcgcccgtttcgtaaaagggcggcatgctatttttgacaaaacgggaacttttttccatccgcgccgtctaatataacaaatcccaaaacggaggtacatccgacatgaaacgattcttaacgctgctgctcgccgcggcgatggtcctgtccttcgccgcctgcggagacaacggaacgacgatccgaaatgaaaatgaggaggacaatgtgaaaaaagaccccattgccgcgcagtatttgcaggacctcgccgtgaagacggcggactatcccgtgctgcccgccatgccgaacgagagtgagcttgacgaggcattcagcaccatcgactatgacaagatgggcgcggacgcctatgaaaaggcgcaggagaagatctgggaggactgggacgcgcgcagcaatgcctattacgatgcgctcaaggcgctgcgcagcaagggcacgagctaccccgcggcattcctgcacttcacgcaggagacgggcacgctgctttcggcggaggagaacaccgttctctcgcccgcaaacctgtatctcgcctttgcgatgctcagcgagacgacggacggcgacagccgcgcgcagcttttatcgctcttaggccttgaaaataccgacgcgtcgcgcgctgcgggcaactatgtctggcgtaacctctacggcgagacctcgacgggaaagacgctgctcggcagctccgtgtggctgaacgagaacgtcccctacaacgaagagacgctgcgacttctcgccgagcagtacctcgcctcgaccttctccgccccgatgggggatgagaagacggacaaggctatcggcgaatggatcaatgagaacacgggcaatctcttgcaggacgcggcgggcgagatcgagacaaagcccgagaccgtgatgctccttttgacgacgctctattttaaggaccagtggcgcgatgaattctgggagaatgcgacgaagaaggacacgttcaccgcagcaagcggcgagaagcagaccatcgacttcatgcaccgcacggacgaccgcgccgcgtactaccgcggcgagaactacaccgtggcggagctcggcttccgcggcgggcagtcgatgcgtttcctgctgcccgacgaggggacaacacttgaacgccttcttgcggacgataccgtcgtcggcggattgatgatctacgatatgggggtgaacctgccgagcggcaagctcgtctggagcgtgccgaagtttgacgtcagctccgatcttgaactgactgacgcgctcaaggcgatgggcgtcacggatgtgttcgacttcaacaaggcagacttctcgcccctcgtcgacaaagagaagttcgacgagagcgtcgccgtgacgcaggtgcagcacgccgcgcgcgtcaaggtggacgaaaagggctgcgaggccaccgcgtttaccgccgtcagggcggacgcccaatccgccgcgcccgaagacctacccgtggtggagatggatctgaaccggccgtttgctttcatgatcaccggcgtggacggtctgccgctcttcctcggcacggtgaataacctataagagcaaagctggcgcgccggcagtaaaaacaaatgatgcgaaaatgaaaaggagagaaacgatgaagaaattatttgcctttttgctcgcctgcgtgtgcgcactggcactgtttggctgcgcgggagcgaatgatgacaaatcggacggcggaccggaggacgattgggcgccgctgacggaggcgcagatcgaagaattcaaggagatgtttgcctctgaggccgatgtgatggatgaaacgacgggcgaataccgctacacgacctcaacgccggtgagctgctttttcacctcgcattacgacgatccgcgcgatatcgaccttgcagaatttttgcggtactgtccgctcagcaccacgttgggagacgcggacgtggaggaattccacgctgtactcgacacgctgggaatagaggatgcggagaggttcaaggtgccggatgactgggcggtccccgtgcggcgcattcccaagagtgacgtttccgcgcttttgacgcagtgggcggatatcacggtggacgatctgcgcaatcaggatggtgtgacgtacctcgcacagtatgatgcattctatgagtttacgagcgatttcggccccggatattttattccggtgggcggtgagcagtacggcgacagcatccggctgtggagcgcgccgcgcggcgagaacggcgaaggaacgcacgatgagttgacgctggaagtgcgcccagacgggagctatcgcattgaagcgttccgtgaagtctgaagcaaaagggggccttctctcacgtgagagaaggcccccttttgatcccccaagagaacggcaggggcgtttcgatctcgcccctgcacccctaacgaccaaaagggaggggccccgcccctcctttttggattatccaccccatggcacttctggtaagcattgcgcctacttcggacgattttgtttcgatggtgcctgccgaggcggcattgctgcgctcgccgcatttctaataggaaaaaacgaccgcattagcggtcgttttcgttctttttatcagttcgttccagaagatagtcgacgctgacgccataaaaatcagcgagcgcgcacaaaacgtgcggcggcagcattctttcgccactctcgtaatatgcgtatgtgcgctgcggaacattgattgcttcgccgacctgacgctgtgtcaaatcggcgtcttcccgcaaatcgcggatgcgccggtatcttttcacgtttatcaccaaatacagtatacgtagaacaaattattctattgcatttttgaatattctgttctaaattgtaaacgaggtgatgaaaatgacgacgtataagactctatatcatttgatggtccaaaatatgagtgaggccatcgacctttacgatgcgggcaaaggtatccttgcccgtgaagtcctaaaaaaagccctgttagatgcagaagagcaagtcatttcgcaagacatcatccccgatgagcctattggcagtaccgatccagcagaaagctaaaaaagcagcaccccaaagcggcgagcgcagcaatgccgcgccgtcagaagcgcggggaggataatccaaaaaggaggggttgcgcccctcccttttggtcgttagggggtgcagggggcgaaatcgaaacgccccctgcttttctcttgggggttccaaagggggaggttctcttttaaaagagaacctccccctttgccccgtgcagcgccatcggcgctgccacccctctcgcgcagagcacgggatatttttcctcaatttttctaaaaaagtgaaagaaaacaaaaaatgactgacccttgatcgcgattactgaactacgatcaagggtcagccatgatgaatatttggatctctcatattccgttttctttccttcctttcttcaatgatctggtgccgaatatcgcttactccggtttccactcctgctatctcaaacaccgcggttgcggcggttttacctgaatgacggtacacatcagagagtgctgcgcgatggatatgatcggaaccatttgggatcgcctttgtgaagatcacttgtacattggtctcaccctttctgtgcttaaagaatagcaagaatgagctcaaaaatcaagcggcggaatggataaagatgcgagcgatattttgtgcgcagggctgattattcgaaaactggcagaaaatgcttgcagttcatccggcactttagtataataaagctgttgggccgcccgaaagggcggcccgttttcttattttcggaaatacacggcgtcccattcctcgccgttggggacgagcggcggctcgatgacaaggccgcttttgccgccgcgctttccctcgacgaagaggagcgagggcgcggcgtccggcgattttgcgagaaagcgcaggcgcttgggctcgatgccgtgactccgcatggcgcagagcacgtcggcgaggcgctcggcgcggtgaacgagggtgaagcgcccgccatagcgcagcacacgctgcgccgcggcgcagacgtcgtccagcgtgcaggcggtttcctcgcgcgcgatttggcgcgcttcgcctttggcgctctcgccgctgccggcgggaaagtacggcgggttcgagatcacatagtcgacgctgccggcctttggcaggacggagacatcgcgaaggtcgccttcgtggaaagcggctctgtccgcccagccgttttcggcgaacgtctttcgcgcaagcgctgccgcgggcgtggagagctcaacattttcgataaaaagcgattcctggcgcgcgagcaggagcgttccgagaagaccgatcccgctgccgaggtcgcagaccgtgtcgccgcgggacgggcgggcaaagtaggcgaggcaaaagctgtccgtccccggcgggaagagggcggtgtcgtaataaaagcaggggccatgcggccagagctcgtcgcgtttttccatgtgatgaccctttctgatgataaaaataaggacgcgctttcgcgcgtccttattttttaagtacccttagaccttaggcctgggagatggcgccgttggggcaggtatcagcgcaggagccgcaatccaggcaggcatttgcgtcgatctgatactgggaatcgccctgggaaatagcaccgacggggcaggcgtctgcgcaagcaccgcagctgacgcaggcagagctaatctgataagccataattagtacctccataagttgatgtcgctattatagcatgtcaaagcgaaaatgcaagagtcagaatgcaggaaaatattgaattttctgtgtcatttacggtgtttatttttgaataaaccggtcaaaaatgaaaggacgaaaaggaagcggagggtagagcgatgaatgaccggaaattcagcctgaaggctgaacatgtgctgcgctgtgcgcaggcggcggcgggcgagctggggcacggctatgtgggctgcgagcacctgctgctcgcgatgctgcgcgaggaggacgacgcggcctgccgcgcgctgaatgcctcgggcatctacgagccggcagtgcgcgagaggatgatcgaaaagctggggcgcggcacggcggaaagatcgaccgtgcaggggctcacgccgcacgcgcgctgcgcggtcgagctggccgtcggcgaggcgctgcgcgcgggcagcggagagatcgaggcgggacacctgctgcttggcatcctgcgcgacagcgggaacatggccgtgaggctgctgcgctcgctgggtgtggataccaaaaagctgtacagcgacacgctgcgcgcgatgagcctgtcgccgcgcaagctcccgctgcccgaagtgcgtgcaagccgcgcggaggcgaaaaacggcaagacgctcttggagttcacgcgcgatctgacggcgatggcgcgcgaggggcggctcgaccccgtcatcgggcgggaaaaggagatcgcccgcgcgctgcgcatcctgacgcggcggacgaaaaataaccccgtgctcatcggcgagccgggcgtcggcaagacggccatcgccgaggggcttgccgaaaagatcgcggcgggcgacgtgccggaggagcttatcgacaagcgcatcctgctgcttgatctctccggcatggtggcagggacaaagtaccgcggcgagtttgaagagcgcatccgcgccgtgctcgacgaggtgcggcgcgacggcaatgtcattttgttcatcgacgaagtgcacaccatcgtcggcgcgggcagcgccgagggggcggtggacgcggcgaacatcttaaagcccgcgctcgggcgcggggagatccgcgtcatcggcgcgacgacgctcgaggagtaccgaaaattcatcgaaaaggacgccgcgctcgagcggcgcttccagagcgtgcaggtcggcgagccggacgaagaaaaagcgctgcagatcttacaaggcctgcggccaaagtacgaggcgtatcacggcctttccatcgaggacgaggccctgcgcacggcggtgacgctctcaaagcggtatctgcccgaccgttttttgccggataaggctatcgaccttatcgacgaggcggcggcaagcgtgaaactgtccgcgcgcagcgcctcgcccgaactgaaagcgctcgaagagaaggcgagcgccgccgcgcgggacaaggaaactgccatccgcgcgcaggactatgaaaaggcggcgcggctgcgcgacgcggaggagagcttccgcacgcaggcggcagctgagcggaaaaaacaggcgcgcgaggcggaaaagaccgctgtgcgcgtgacggcggaggacatcgccgccgtggtgtcgaactggacgggcattccggtgacaaggctcaacgagagcgaaagcgcgcggcttttgacgcttgaagaaacgcttcatgcgcgcgttgtggggcaggacgaggcagtgtgcgctgtggcgcgcgccatccgccgcgggcgcgtcggcgtcaaggacccgaaacggcctgtcgggtcgttcctcttcctcgggcccacgggcgtgggcaagacggagctcagtaaagcgctcgccgaggcggtatttggcagcgaggacgcgatgatccgcatcgacatgagcgagtatatggaaaaacacgccgtctctcgcctgatcggctcaccgccgggctacgtcggctacgacgagggcgggcagctgacggaaaaggtgcggcgcaagccatactccgttgtgcttttcgatgagatcgaaaaagcgcatgaggacgtgtggaacatcctgctgcaaattttagaggacggcgtcgtgacggacgcgcaggggcgcaaggtggactttcgcaacacggcggtcatcatgacgtcgaacatcggggcaaagagcatcacggcggcgggcacgccgctcggctttgcgccggaggagcagaaaagcgccgacgcgcagttcgctgccgtgaaggcggcggtgatcgcggagctgcggcggacgttccggccggaatttttgaaccgcgtggacgagacgatcgtctttcgccgcttatcgcgcgaggactgcgccgagatcgcgcggcggctgcttgcgcagaccatttcccgcgccgcggcgctcggcatcacgctcgaggcgaacgaggactgcgcggtttccctcgccgagcggggctacgatgtttcctacggcgcgcgtcccctgcggcggctcatccgcagcgaggtggaggacgcgctcgcgacttgccttttggacggcacgctcgcaagcggcgacacggcggttttggcggcggaaaacggcacgctctgcgtgcgccggcgggagaaagcggcggccgccgccctcggcgacgtcggtgcgcagaaggcgtgaaaaaagggacgcatcagacagaagacccgaccgatggatgctcatcggtcgggtcttcatgcttgtgcaaagattttttgcggtcgaatgatgcgaggactttttgcccttgaagggatgaagccggcttggcaaaccggaagctgttaaagaggatgattccaatattctacagcatttccgttcacgtcataaaaagtaatgctgcccgcattgatcggcaggacgatcgcaaagggctgatcgctgtcgatatcgatcgcttgtttggcgtggccatcatcaatttgaagctgctgcacctgctgctgattcatggaaatcaatgcgcgctcattagcaccctctgtggtgaactctgcaattccttcctgaatctccgagagttttccgcccgcgcggaagaaatatccgaaggaaagtcccgggcgattgacatagacggaaaaagtgtggtcgctcatgtcctgcggataagaaatatatgcagccattgtgtcagaaacacttccatcgatcgcccaatcctccttgatcttctgcgacgaacgaatgtcagtctctagattccctgatgctatgccaatatcgctgcttacataaagaaaaccaacaaataagctgcaagcaagaagaatccctatcacagttttaagaactatctttttcatggctatcaaaactccttagtagattcctgattttttgccctggatgcgctcctcctcattcaaagcgctcaacggtcgttgcgaggtcgtagcttgccttgagcgccttgagctttgccatcggcttgcccacggagtgcttgtcgagcgcggcgcggtcgcgccagtgctccacgagcagcacgcagttttcctcggcaagaggccggtagtagtcgtactgcatgcagccctcttccgcgaggacggcggcgcgcaggccgcttcgctccatctccgatgcaaagtcattagccttttcgccgcgatagagaacgtgaagtaaaatgccttccataaagtaaggctcctttcctgcttgttcgtattacgatacgtcgatcatttcgaggtatttgtagccgttttcggcaatgtggtccttgcggccctgcaaattgtcgccgagcagcaggtcgaacgagtgcgccgtcgcttccgcgtcctcgggcatgaccttgatgagacggcgcgtctcagggttcatggtcgtgagccacatcatttcggggtcgttttcgccgagacctttcgagcggtcgaccttgtagcgcttgccttcaagggtcttgacgatgtcgtttttctccttgtccgtgtaggcgaaccacgtcttttcgccgcaggtgatctcaaaaagcggggtctcggcgatgtagacatagccctcgcggatcagtgtcgggcagaggcggtagatcatcgtcaggatgagcgtccggatttggaagccgtcgacatcggcatcggtgcagaggatgaccttgttccagcgaagattgttgatatcaaaggcgttcaggtccttgacaaacttgcccggcacctcgacgccgcagccgaggaccttcaaaaggtcggtgatgatctcactcttgaaaatgcgcggatagtcggccttgagacagtttaagatcttgccgcgcacgggcatgatgccctgaaactcgccgtcgcgcgagagcttgacgctgccgagggcgctgtcgccctcgacgatgtagatctcgcggcgcgagacgtcgcgcgtgcggcagtcgacaaacttttcgacgcggtttgagatgtcgatgctgccggagagctttttcttgatgttcaggcgctgcttttccgcgctctcgcggcttcttttgttgatgagcacctgctcggcgatcttgagcgcgtcgacgcggttttcgatgaaataggtctcgaggcgggacttcagaaagtccgtcatcgcctcctgcacgaacttgttcgtgatggcctttttcgtctggttttcgtagctcgtctgcgtggagaagttgttcgagacgagaatgatgcagtcttcgatgtcttgccaggcgatgcgcgcttcgcccttctggtatttgttgttgtccttcaaatacttgtcgatggcgtagacaaaggcagtctttgacgccttttccgggctgccgccgtgctcgagccacgaggagttgtgatagtgctcgatgcgctgcaccttattcgagaagcagcacgcgcaggagagcttgaccttgtattcgggcttgtcctcgcggtcgcggccgcggcgctccgtctcccagaagacaggggtggtcagggcgtcttcacccgcgatctcggcgacatagtcgatgatgccgtttttgtagacgaagtcctgcgtctcgaagtggccggggaggacttcgtttttgaagcggaacgtgatgcccgcgttgacgacggcctgacggcgcagcgtttcgacatagtagtcggcgggaatgtcgatatcggtaaacacgtcgaggtcgggcagccagcgcgtgcgcgtgccggtcttgcggccgcggtcggtcggctcgaccctgagctcgtcgccctttttgcccacgggctcgccgcgttcaaagtgcagggagtatttgttcccgtcgcgccagacggtcacgtccatatagcgcgaggaatactgcgtcgcgcaggcgccgagaccgttgaggccgagggagtattcgtaattgtcgccgtcgaggttattgtacttgccgccggcgtagagctcgcagtacacgagctcccagttgaagcgcttttccttggggttatagtccacagggcagccgcggcccatgtcctctacttcgatgctgtggtctaagtagcgggtgacggtgatgagcttgccgtggccctcgcgcgcttcgtcgatggagttcgaaaggatctcgaacacggcgtgctcgcagccgtccagtccgtccgagccgaagatgacgcccgggcgcttgcgcacacggtccgcgcccttgagggacgagatgctctcgttgccgtaattcgttttttttgcttctgccattggggtttctccatttcgccgaaatttacgattctgatcttcaaacacaaaacttggtacattatacgattttttgaccacaatggcaagtggccgcggcagatttttgcctttggcgggaaaatgcagaaattcgcgggaatttctgcgccaattatgccgaaagacgtcgaacataacaaagcgttaaccggcgggaacgcactggagcaacaaagttattcacagtttccacagagttttccacatcgttatgtcaacagaataaccgcggataaaccatgaatggacatgcttccgcttcctccacgcggtgaaagagggagaaagcaaatttcgtcaatttgcccccttgacgaaatggcgcggacgtgtgcgaaaaaagagagcgccgcggcgctcctttttttctcacagcagcatcaggataacgccgtacacaacgcttgcgagcgtgccgaacacgatgaccggccccgcgacgacgaacatctttgacgccataccggtgatgaagccctctggttgtgtcaagatagacatacagttttttcggaattttttcagctgcctccaaagtggggggcgcttattgttttagcttgccgttacaaattcaaacccgctcgaagtacgcatatctatctcaatctctcctgaagggtacacacgaacccgctctacaaaatttctaattatttccggatcataatctttaagcaggatgatctgatctgctgttctttttcccgccgcaagattacctcgagactcatagtgctctaccagaagccgcttgatctcttcagctctacttgagagtcttgccagcttctctgaacctgtcttctggatatcagcaaatttctctctgcttatgcgacccgctcggtattgctcatatagttcagcctttctactttggagccgtcttgtcatattggtgttagcatcaagctccgtttgaatacttgaaagctttttgtcaatgcatgcctgcatcaaacaatgctgctcaaggaagttcctactttgttcccgcagcatctgaagaacagcttgctcaatttgggcctgattgacaaagagacccgcacactcagcacccttaatactgtcttttttcgggcaaacaaggtgtggttcctttgctggattctttcggagcttcctcccgcagcagccacaaacaaacagattgttggctcggtttccggcagtattcttgttaacattccgaatacgcccttggagcgcattctgtgccgttcggaacaactcctccgaaatgattgcttcatgtgtacctggcactatgatccattgatctcggggcaatgatcgcatcttaggctttcctacttcttctgtctctcgagtattggtaatcatcttaccggtatagcgttcatcagtcaaaatctttcgagcagcccccttgagccagattccagtctcttccttgaccaccccattataaaacccgccatttcgccgtttatgctctaacggggatggaatgcccatatcattcagcatttgagcgatctcgctcgtggtcatgcctgtaacgcaggactcgaaaatcatgacaatgatgtcacgaacctgctcatctacgatcaatctctttttgttatgaggatggacttggtagccatagaagccgtttcctccccagtattcaccacgcagattgcgggtacgaaaagctgagcgcaccttggttgatagatctcggctatacatattattgatgagattgcggagggctaactcaagtccgcccgtgacacctaagtagtcatcactatcaaaggcatcattgatagagataaagcggaccccataaagaggcaggatcagttcgaggtagtttcccatctcaagaaagtttcttccgaaacgagataggtccttcaccataatgcaatgaatttcctgattgcgagccatctcaattagctcatcgaactttggcctgtcaaaatgtgttcccgtgacaccgtcatcgcagaacacgatcactttataaccatggagcgattcatgtgtatcatagtaatcctggagtaaccgcctttggttgaaaacactgttactctcattcttcaatgcatttgtttttagatctcggtcttcactcgacaaacgaatataaaacgccagcaccttatccggcatatctctccgcctcctttcctcgggtcgcagcgacatagagaacctgttcaatctcatcacgatggcggaatgccacttcaacatggccatcgttaaacaaggtaagcgtctcaatgaaggctgctgccatttcagcgtcaagggactcctgatccttatacttttcaatcaacagtgcccactgcattttgctgccaaatcccactgagtacttttccttttccttctccaattcagcaataaagatcctcaaatcatccgccctcctagagtagtcctcgctcagatctgtgtaatcttgatggctaagaagcccatctgcaaaatcgccatacagggctgccttcagctgattgaacttttcaatttttctctttgcatcatcaatctgggtttcatatatctgatagcgggtctgcgaagaaggcgtagcattcaagttggcaatcagtctctgggcatcggagaatgctcttatctgagtttggataagccgcagggcaagggactctacatcctcctgtttgaccgctttcttgggacaaatggtggcattgtaattctcatggagagtgcaataatagtaataaccgcgattagatttactgcgcaagtacatactgcgaccacattctccgcaacgaagaattcctttgaacatacttcttcgtttactcttggaatcgtagatagtcgcaaggccctgttcactttgcctagccgagaggatgtcctgaaccttatcaaaaagctctttggaaacaatgggttcatgcatacctttattgataatccattcctcttcgggcgttttaactgtagtctttgtcccccgctcgcacagctggcttctgtactttccggacacaatccaaccaagatagaccggatcgacaagaattttcttgatcgtttgcagataccagatggcatttttgaacttctccgtcttccgcaaaccaatatcgtacagatagcgtccgggactgggcaccccttgctcattcagagttttcgctatgaagtggagagtatgattctctgccaccatacggaaaatggcaaggacgattggtcccgtttgcggatcaggaaataggtggtacttgtcatccggatctaacatatatccatatggcggagtgccagtggtccacttaccagcaagctgctgcgtccgtttcaccgcccgaatcttcttggaaatgtctctcgcatatgcctcgtttgcaaaatttttcagttggattgaaatgtcggcatcatcccgcaatgagtcaaagcgatcggtaacggagataaagcgcacacccattctcggaaagatctgctcaatatactcaccgctctcaatcatatttcgccccagacgagacaagtctttgacaatcacacaggtcaccttgccagctcggatgtcattcatcattcgagcgaattccgggcgcacaaagctaactcccgagatatcgtcatcacaatagaggtcaaagacaactaaatcctgatgctgggaaacaaagtccttcagcaacgcaatctgattacctatggtgtctgcttctcgcttttgttcgttctcaaccgagattctggcatagagcgctaccttgtactggacggggcctacaacaactgcgggtgtggcttggacattttttctgctctttcttgccatgcttacatcgcctcccctagtattccacgcgcggcatattcctgcaggctgctcaccaaacgggcatagtcctcggaatgctcaaagatgatttccaacttttcgtctttgtgaataacaactttttcaatgcactccagaacaactgcccgcgtgagtgatttcaatcctcgatgttcggtaaatgtcttcatccagttgttcggggactgttcgcccgagagatagatactgagttctcggtcgatctgctcctgagcaatcagcgcatcggcaattcttgcatcatactgacctctgatgtcacagaagtcagtcttcgaaatgagtccttctttcatatcttcatagagagatgccttcagatcgcgataacgagcgatttctgccgcaagtttttctctgcgctgctcacacttggcaacattgattttctgatatggcacctgctgaatttcagatagacaccggtcgagctcaaccaccgcgctgatatgctcttgcaatagctgaaggacagctgcctcaacctgtgcctctggtacctgcttgagttcacagcgatcctctttcgtgcgcacgctgcagcggaaatagctgtataacttatatccgttgttaattgtgcttcgagtaactgcgttcccgcattctccgcattccaacaagccggatagcggataaactgtcgttgctcgtggtgctgctcgcgtatctatcagaagagctttttgagcaagatagaatgtcctcttcgtgacaacaggctcatgggcgtcgtggatcacaacccactcgttttcttctgttggtattgatttcttgattttatagtttggtctacggcgaagaccttggcggagggttccaatatagatcgggttagtgagtatccgcgcaactgcctgcgctgtccattcgcaccgttccttcattttgaagccggagaataacggctctcccttgtggcgcttatactccagcggcgcaagaattccgctctctgcaagccgaattgctatgccattgttcgtcatgccttgaattttccagttgaaaatatcctggacaactgtggcagcatagggatcgggctcaattcgattgtggtttccctcgcacttctggtacccatacggtgcaaacggacaaataaagtcaccatgtttccgcttcacctgcagctggcttctgaccttcactgagatgtcacggctgtagttgtcattcatcaagttcttgagcgtgatgctaaactcgctactctcgtcacgggtaatcgtgtcgatgttgtcattgatagcgattaagcgcacccctaaaacaggaaatagacggtggatatactttccggaattgatatactctcttccgaaacgggacaggtcttttacgaccacgcaattgatccgtccagccttaatatcgttcagcatgcgctgaaaggctggacggtcaaaattcgtccctgtatatccatcgtctatacgaatggagacaatattaaattcaggcttatccttcagaaagtccagaataagctgcttctggttggtaatgctgttgctctcacggccagattgcgccgcaacgatgtcttccttggaaagacgcacataaatggcggtattaaacacagccatctcattcgcattattctgcataatctcactcctttggcgtggtctgtctgcctaaggagtgagtatgcttgatttagtccgaggctattataccacatctatggccctttatccagatgaaaaacggacctggcaagaattacatcatgctctgctgctgcagtagatgcttgaacacttcctcaaaggatggcccgtcctctttgtatttcaccttgacagcaaagttgcccactcggacacagtatggattcttcacttgcttcagataactgagcactctttcacgcacaggcaaggattcatcaatgtgaacggtgctcaagtccacaagctgagacttgtctactgtccgaatatcaaccgccttcatcgcttcccactgctcgggtgtgatatctcttggatcatcagggatttcggatgcgatatatggcactgtaccagaagtaatcttaggttcttccataataccgatagcacctccttgggatattatccctagtattatttggattattccagcagttcactcctcataatgaatgtagaaatgagggggtgtttgaccaccctctcttatcaaaaaattatgagcagccccaaaaatcattccggcctctcgacgctgaaaagagggataatatcataattcccatcttctgcagtttcgagacccagctcttccaatacctgtctttgaatgtcaggcttcaagtcatcaatatagatctcaacgctcatttgtcttcctcttgataagactttttcaaatcaatccacttgcagtctggatagttccctcgcttacagccaaggcagttggtcgcaaggcactcctcgagccaacaggtgtagcaggtatccatcccaatgtagtcgcttgaggcataccaaaaacctgctgggtggcgcttaacaagccaaccgccacagacattacagtttttctcttcccaaacgaccgttgcagttttatcccactcaatctcctggccgcacatggggcagaagttccatctcggatggtcgttatcgccatcaaacagagccttctcacagttcgagcaggtatagactgacttgatgttcggtcgctcttgggtttcaataggaaccatatagatcctcctcatacgcagagggctgcagctaaaatgctgcagcccaagtcataatcatttgttccggaaaaggtgcttatagagatcatctacgcctttccgcttttgtgtccaggtaatcggagccacctcaaagccagcagcaacccccatttcgatatagcgatcacgcgcctttcggacctcttctttgacctggtagtccgagtcaaccataatgttgattcgtaccacgccgatagagttaagctcttcaagcgcacgctcgaactgggaatagcttggcactccggtaaggccgacaaaaccactttcatatgaggtgccaagcgcaaaattgtaggcaatatctgccttcatcacgccttctgtgagacagactacctcgtcgccttcgtgaaccccgacataatgtggacagcacttggactgtgtcccatagtactgatcgatgctcgttaggttatagaacttctggttataaaccttatcgagtcgaacctgaatggcctcaatttgcccattaagatttcgatccggaagcatgattccagaacctctgatgtcgagcgtccactgcccggtatctttctggcaatagaagcctgggacaccatcaagaatacaaccgcgctccagcaactcagtcacgatccgtctcaggcgtgtcgtgggggttgttcgatagccaagccagtcaatctcatcttgggtcagacctcgttccttcagcgatgcttgatgtgtggggcacagagtcaaaagtgagagcaaatttgaataggtgttatcccgtacctcggctgaggctattggaagttccactgtctcaatcgctttccgctttcgcttatactcacgcggcttttcattgctgtcggaaccgaatatcttacaaagctcctcataggccgtatggagggtgacttcgcaaaactctgcgtaaaggtggaggatgcccccacctttgccgcagcggttacaccgaaacacgttgtcccgtatcttcacattcatatgagcttttcgatctgcgcagaatggacatcgacaatgtagttgtgtgccggtatctcggatcacttcaattccaagcaaatcaactacctgttcgatatcacatggcagatctggttttctgcccattatcaatcacctccctcggtgaggggcacagtcaactggccatctggccaactgcttccagcaactttgtggcgccggctttgagtgcaagattatggccggaatagttcttcacataccacgccaaatcaccgggattcttcatggcaatgtcccccagagtccatccgttaaagcggccgaaatcaaccttaacagccttggccagctcgatggtcatgactctcatatactcatcaaccgtcttaggcggttcaggtacagctgctttcggttgctgtgcgggtgtctgaggctgcgtctgctgaggaggctgaggcaccggagcactctgagccggaactgcaggaggcatcggctgcgcggtatagctggccgctacatttcccggatgttcggcgtcttcatcaggcggcattttgatgggagcgtctgcgataatgcttgccagcgcttcgccattcatgcagaactgcgtaccatagccggcatcggccagtgcgcgccctttcgccaccgtttcggcaatctccaaaaagcggtcgccaaaacgctcctcagtcggaaagcgctgagagtaggctttcccaatgaactggtcagcagggtcagccttgtctgcgtagaccttgcagcagacaacagcgctcttctcgtctagatgtacaagctccggatcgatcttgccattcgggcaatgcagccggaaccagaggagtcggtacttgacatccaaatagagatcgctttcaccttcttctccaacggtgttacgcacaaagtcagcagggttaaatccttcaacggcattgatggccgggatcgcgttcgtgttcaattcactcatgttgagtcttcccttcataataaatgtagaaacgaggtggcatctgaccaccccgcttcccaaaaatcaagtcactcgcttgctgagctcgcggttgtagtaagccacgattcgatcagcgaggacggtgttccgttgacccacatcacatttgtggatcgcaataaatacggcttgtttctgcccgatcagaataacctttgccttggctctggtcaccgctgtatagagcaggtttcgccgcaacatgatatagtgctccttcagaagaggaacgatgatgaccggatactcttgtccttggctcttatggatggtcgtacagtaggaaaactcaaggtcctccaacatttcctgcgaatagctcagctcacgcccatccagaagcttgacacgcacgatcgtatcatcatcctctgtctccatgtcggttatgataccgacatcgccattcgacacattgatcctgtttacagtctgcataatgcgatcgcccacacggaagacccggctgccacacttcacttcctttttcaagttgttcggagggtttacgagatcccgtatcgtctcgttcaatgcattggacgccacagcgccacgcttccgaaacggcgataggatctgaacatcctctatgccatgaattgcaacttcgcgcagatagtttttaatgaccagctgcgctgcctcttccgagttttgcacttcgagcatttggaagtcattcccatactgtaagtgtgtgtcattatgattgattgcatgggcattggtgatgatccgactattggatgcctgccggaataccgtttccaaaactgccgttggcaccttctcgctacggatcatctcccgtaacacattgccggcaccgacagatggaagctggtcagcatcacctacgatgatcagttgggctcctggcttgattcgctccagcagcacatacgcaaggcgcatatccaccatagagaactcatccaccacgataagatctgcagaaagcatttccgtatcgttgagtggactatcctcttcggtgaccagaccaagagcagagtgaagcgtggaggcatatttgcccgtttgctccgacattcgccggctggctctaccggtgggtgcagccaaaaggatctcgtttgacgggaacgctgcctggtagatgtccaagataaaccttagcgtcgtcgtcttgccgctgcccggtccaccagtcatgatggatatgggataggacaagcacagcttcacagcattgcgctgagaaggggccagcctctgatgcaagtttttttccgcccgatcgatcttttcatccaggtcacggatctcatcgaacccttcctggaggagcatggacacaatccgcttagcagctttgacctcacacatacgctcatagctcaggtacacacgagatccctcaacatagacacgggactcaacacgctcattcgtgatggcctgtcggatatcctcctcggagaccacctcttcttcacaatccgagttgagcaggtcatagcattggcccacagtctcatcaacggtcaggaagagatgtccagatacccttgcctcatccagcacataattgattgcgccagagtatcgcataggatgctttaggcttaccttggttttgcgggcaatcgaatccacggtcataaagccaaaccctttgatcttacaaagctggaagggatccgacttcacgatcttcaggctgttgtcgccgaactcttctttgatcatcgcagccttcttcattgaaacgccaaacggcgccaagtagatcataaggtcgctcagggccgttgtctcctcataggaggcgatgatggccttgagcttcctctgggcaattcccttgatgctcagcagcttctgtggctccttgtccagcacctccatggtcttatccccaaaccttgcaacaatggctttggcaatttccgggccaacgcccttaattacaccactactcaggtatgcgaggataccggcctgatctacaggaacgatctccttacacatcgagaccgataactgaagaccatgcttcgagttctcccagatgccctccagctctacctccactgcattggaagccacgagatgatagccgattgccgtgaagtggattttgtcgtcatggtagaacgatcggttgcgcgcttccttgggaaccgacggatcctcggtgctgtaggagaagatgcagaagcccttatccgacttgaagatggtgcgctcatatcgacatagcattcgatcactccttatgcgatggccgtcttgaccaccttgaaaattctcaattctgtctgatcgacgaactcgtcgtagatttccggatactgcgctctcagcgctgacagcctgtccttgttgattccttccctgtattgaggattgtaggttactctgaagcactcactgccgtgctcacaggacgccttgcaggcagtccccatttgctcgacaatgggggcgtagagcgacttaatgcgtgtctccaatgctttggactgcgcatcgatcaccttcttttcctccttcaggttcagaatttctttcaggctgccaaggaacttgcagtccaaatcaacactcggctcagacttatcggccggcccgaaataacgacgaagggactccagcactgcatccggcttttctaccagaggcggttccacacgagccagaacatgattgcgccagaacgcctccagctccataatcgtattctcctcctcatcgaggtcacgctcaatcttctgccatacgaagtcgttctcattgttggaaaacaggcatgcgataaaggcgacatcgatgttcatgacggccatgtagtgtcgcacctgcagctcataatggcgtggcacagagccattcgcccacttgaactgcatatcatagtgcgcggttttgcattcgaggatggcctttcgaccatccggaagcataacgaaccggtctacatcggcaatcaggaacgggaaaataggatgctggtacatccagtggtcttcaaagacagacaggccggtcttcttggcgaagatctgagccaccacatcctcgagcagatgcccaatttggaaagtgatgctcttatccgggccttcatctgccatgaccactccgatcttgtcatagtagagctctctggccgtgcgatacggagaggagttaagggcgacagctacatcgctgccgccaatccctttgcgccgccagtccaaccactgatcctcagtgagggtggtgatatcgaccagcttattgggtgtgtaattcaaattcagcgccataattcactcctcctcacaacgatcgaaaccacattcaccgcattccgagcattcagcatcgtccagatcctcaaaggatccgaagtggctgatctcgccgcagttgcggcacttgcagcggctcaggtctcgttcggcatggttgagattgccgtcctcgtcgcaggtgacatgttcctcaaagcacattccggtctccgtagagcggatttcaacagctacatgatcctccatacaggcctcactcagcgtgatgcactcggcatcatttcgctgggggtaaccatcaatcatgcaggaccaaacagaccaggcaaacatgatgaggaaggaatgctcagcagtttcgttatctgctttcccttcgaattcttccatggcatccttgacgctctgctctcgcttctgctcggaaaaactccgggcaaaaaaccgctttccggggacagttgattgatcatcgctgctgatgaaacgttccacaaaggacttaacaccctcgcgagtaccagtcaccttaacatttccaaacgcccaattaggcataatcgatcctcctcattcttcaaaatcagtgttgtagtgttcaacaatcgctgttggctcgtccgatgcgcaatcgccatagacgactgtctggagcaaatctttgtccggatcatactccacacaagccagaacgaccgtggcgccatcctcgcgtacaaagtcgataaagacgccgggatagtcttccgcacaatcgctcttatcgtgcttggcgtagacctcaagctttccaagcggaatctcaatgacgaagcgtcgtgccttattcatgatcaaccaactcctttttcttttgctgtctgtcgcttggcaagcagcagatgcttggccagctcaaggctgcaggtatgcactaagccagtcttctcacttctgaaccgaaccatcggcgaccggagcgtatggtatcctccggagcctgacgggtacattccaggctgcaaaacttcagacaccaccaacacctctttactgacgagagcatagtattgctgcccaacttcaaagtgctcattgatggctttcatgggttgcctcctggttcaaaaccagatcgtccacctggatcgagtcatctacatactcgccttcaggaagcggacaatccggtcccaaggcgtattcgatagcgtcgtccagggtatcagcctctacattcacatgcccgtacatctgccaaaccaagggaattcgaaaactgctcatgatgacacctccgtagcctcgtttcccgccgggacaccgagatccttcagaactgcgtccatgtgatagaacacctcaccgattccagcaaaaatgtggtcgctgtcaagcacccacatgagatcgtgcctctcgccatcgggggtacggacgaaacattcccaccagttgttgtgctccatatcgatccaataccgattgtgcttcctgcagattgctgctaccaaagcacggtcagtcttgagataaggctggatatccgatccaaatcggccggagttgttcttgtccttcacatagagcagttcgcgatcgcggtcgctcttgtcatagagccatgcgtagacatcgcctaatgcatggacctcaaaaacgcaaccgtgaacccgaatggcagcgatctggccgccgtaccatagcgatgaatactgtttccgtcgaatgggctccatgaactcgatttccaccggttcaggaatgctgccaatctcttcggtaatgcatttaatcagcattctccgatgagcggcactcagtcccttacatgtcaggttttccatgcgttctctcctttgtctgagtaattaggtccagctgtgcgaaaattctccgccaatgccagacatccctgaaatacatcggggtgagccagacattggggctgttcttggggataagtccgtcctcatcgtagctctgcgccggatggaggatggaatcgtcaatgaccacatagccgggacagccgagtaggctcatctggatgtagcacatgcagcccgccaagaagtcaatgtcttgcgcgacaaagaaaacggaagtctgatagttgatgtggttccttttgcactcgtttgcgaaggcaagcagtaatgcgccggccccacaggcgggatcactcacagatacccagcctttttcctctatctgacttttcaaatcctcacccagattcatggctgccatcgctctgcagatgtcatagggtgtaaagaactgccccttccactcattcgcaaggcccaatgccatgaacagctcgccaagcatatcctgatctggattttgctccatctcatcgacaacttcggcgagcatctgcgctaagacttccagctcggaggttgagtattttttgctacgctccagatacatcgcttcgcgttgctctctgtatgggccaccgaaagcattggcaatgctgacggcagacaggacaatgaaatcctgccaaatatcccacctggaatagcgcccttccagagagttcaaaagcttgatgatggtcttttgcctctcacccttcgggtagtaaacagctttggccatcgcaatcaccacttgaagtcgccagggtgatcatactcgtgccagttcacattcagtgcccggctgacgatctcctcaagctgtgcaatgcgcataccggatgcgccgtcacactgggcggagaagataacatcgctcatctgcatgaacaggtcatacgccgtacagggcacatcaccgtgaatggccataaagtagtccatcgcctcataggaagccttcttgggcgccttgatccgcttcagcacccgcattaaggtagtaacgggatagcggatctcgatgttcatgagctgaacctgcttatcgactgctttctcgaactgcgcatagaccagaccaagctgctcctcgaagtactccatgccagatccgttcttgtgctcggtgcggatgggatatcccagtgggataatccgggactctgcgccggccaggaagatcggatagaggttcgctccactcatgccgacatcggaggtggagaaacgcagtgcgggaaccagtttgtcggcacgcaggcctttggcggcaatctcccggtggtatgtatcaaggagtttgtctgcctgaccatccaggcgccagatagcggttgcgatagagtgatcgaagtgtgcggtcatgaagcgattaccgggatactctcgatcgagaaagtcattggtcactttgaacaggggcagcatctccatgaccgtgtagtccttgggatctccaccgtgtactgccgataccttctcatctgcgactttgatcaggctgtcgccggaggcaacgcccatgcagtagttgagaatctcagcgaatacgcttttggaaactttgttgagggcatgaccggagatgcgggcacgctccagaacggtcttgagagcacaggaacggaccgggtagtccttaccatccaccttcaacaggaggctggtattctccatcgtgtcctccagaacatctgcatcgccgttgtggtcgtagatctgcatatacagatttccgagcgtggatccccgttccaccggctcaaaccggagttccttggacggagctgtcatccacttgctgcgggcctgccgagcgctgaggaactgaaagaagtcccccgactcgctgaagctacgactgaagttgtccgcgaatactttgctttccatcatttgcttgttccacctttcaaataaataattctcaaacccgcaatacggaatttggacaaaaaaagagcgctctgatctgaaaattcaaatcaaagcgcaaagagagcggcgaaacaaattgtccgcccagaaatgccagaatgtgttggctcacagcttatgaagctccataacggagatgaaatctaataagtacagagtcagaataccattggagctttactcgtgccagaatacctaattctgctttccagacgaaaaaggatcgatcccattcaacagagatcgatccttccgtctttattcagttttttgggatatctcatcaaggtcgtccagccacagggaaacctgtaccagtgacatgagaccaaaaagccgtagcagtggccagttcctgcgttaagcgaggaatgaattgatcgggctcagagcccacctcacaaatcgtcatatgtgtatggccttcgccccaaccacacaggagcagagttccttgctcagtcagctcgatcgtgcgccagatgggattgctcccatcctgcttgatggagcaaccaatcatcttacagtgcagaggcatcgtgggctctggaagcttcattaaaatgcagagccggccagccgtgttgccggctatgacatcgaagtctgtagcaagatactcgataatgtcttcattgtcagcctcgctgggctcgacatagttgtatgcggttgccatgaacgcacccttcttcttgagcgcatgtcggataaaacgctgaggctgctggaagaaggaatacggcagatggatgtgctcattgaaatatctttggatagcagcgctatacattgttacctcctcacttactcgaaatcaaaaaatatcaaccatctcaaaaataaagctcacaaaggcatcgtggtccgcaaactcacgaagcgcacaatctaacaccggatggaacgagcggatcgtctcaccctcgttcaaccagcattggtgctttttatcatcagttctcataaaaattccttcaaaggcactttgcgctcaacaaaccagcgcccgatcttcgtgtcggtcggattggaggagcgttcaaaatatagataggttcgtgctccgttaacctgaatggtataacggtcgccttgtccacctgcctttgctgcataggcaggccgaatatcaatcactcggtctatgtcatatttcagaccgtcttcccagactattgtgcgtggaagcattagtccctcggtagtgtgctctacaaaaacattgacatagaccttaaatgctgcccccggtaacatactcaattcagaggctgccccagatcgcgcttgagaaaatccccatgtgcgatgtaaggggcattgatcttgatgccctgccgctgcaagattcgcagcttgaagtccagcagctcgggcggtacatacagacatctggccatctggaagaagtccatctgcatctccagagactccatgacctcgtcatcactcagcatgaactccgcagcgaacacatttgcctcatactccatacgatccgtgtcatcaaacatcgcaaactcatggaatgcgctgatggccgaatcgctgtgaagaacagcatgtcccagctcatgagctatgataatccgttgaatgctttcgggtaaatcactgttgatcacgatcagcttgcaccgggaagagaccaggaaaaagcccttgcaggattgggcgcttgcgcccataggccgctttattacctggatgtccatgctcgtgcaaatatcatacgggtcggtagtctggtatttcattttcaaacgatttgcttcctgtttaatcgccatcgtcagcaatccactcacctcacttcagaagtagaatagcctatcgtacagcataaaggtaccaaaaggggtgtccaataatccgtacacacagagatgatccggcttatttcttataatccttgcgggtgaacttctcgctggcacgctgcttgttggcaaaataagcctcggtgactgcctggaagaagagttccttatcttcctccggtacatcgccaccggcgaagagggctctggtctgagtcagtagttgctcgacatcagcggcgcctctcttaccgtagactgcccgagcactctcaatgtaaggagattcctcgagtccgtaagcgggatctacgatctcatcgttgctcagatatgcgatggaaacgccaagaacctcggccagcttttgcaaattggcgccacgaggcatcacaccctgcttttcatatttggagatcgtgcgcagcgtaacgccaatcttttcggccagctcagtctgggtaatgcccaggtttgcacggccttctctgattttttctccagtcgttttcataactgtgcctctttctgcagatcgggaaaagtttttgaaagttctattgacaaacctatcttcgacctgctattttgttgttagaacttttatggaactatttagaacttggttggaactttagcctcattatattctggaaagtggaacttgtcaataggaacttttaggaacttgattggaacttttcttaaaagccacagacaggaggcacaccgaatatgggaggtcgggttgtattgcatagcgacctcaataactgctatgcgagtattgaatgtatgctgcatccggaattgcgtggaaagtacattgcggtttgcggcagcacggaggatcgtcatggaattgttcttgcaaagaatcagttggcaaagcagtgtggggtgaagacaggtgaagtgatttgggaggcgcgccaaaagtgtccgcaattaacgatcgtccctccgcacatggatcagtacctgaagttttccaggattgtgcgtgcaatctatctgcggtattccccggaagtggagtccttcggcatcgatgagagttggatcgagctcaccggctcgccccttttggcacataagacaccggccgagatagccaacgagatccgaaaggcagtaaaggaagaagtagggcttaccgtatctatcggggtcagcttcaataagattttcgccaagctgggatccgatatgaagaaaccggatgccgtaacagaaatcacggaagcgtccttcaaggagcaaatctggcccctgccagcgtcggaacttctctatgttggacgagccaccacagaaagactgcggtgctacgggatccacaccatcggagatctggccaaagcagatcgtcagatgcttgtccgactgctcggaatcaacggcgagaaactgtggatcttcgccaatggacttgatcagtcccgcgtgatgccctgcgactatgatcctcccatcaaaagcgttggtcacggcattacctgcacggatgacttgctctcgaaagatgaagtgcgccatgttctcatggagctttctcaggaagttgggctgaagctccggaagaataagctggctgccacacgggtccgcatcagcgtccgcgacaacaccctctcgcatcgggaataccaaggaaaactgacatttccaacgcaaagctacacggaaattgcagcggcaggctttgaactgttctgcaagaagcatacctggaacaacaatatccggtctctgaccatcagcgcaatcgaccttatcccgtctgacacgccgatccagctcgatctctggtcagactttaccaagcacaacaagcgcctcatcctggagcgcaccatggaagacatccgtcgccgctatggcctccattccatcaatttcgccgcactcaccacggggctgaagatgcctgcccatcgggaggttgaatacaagatgccctctgttatgtatcactgaggaggtattgactataaacgcagcagttgaaacgactcaagccagacaccccattttgagcaatggctatggctccatccagatcgacggattttctggtctgattcccaaaaagtgtttttgcattatggccgatggacatcgttatcaggagcacggtatttccaccggcagcgtgttgttctgtcagagggcagccgagatcaatgacggtgacctgatcgtcgtgaaggaaaatggagtcttcgcactctatctctacctgaaagatcgtaaagtcaaggcggacggcgaaaagcgcatcctccacaataagtccaaggcctatgccaaagttcttggctccttcaacttttaccattaaagaggcctggcagaaaggacgaataatgagtaaattccagaactacttgaaaacctttgacatcaccagtaccctcaccgaggaggatattgataagactttggcgctgctccagatttacggccccgccgttcgaaggactgcctctcgcatcggtgagatggaagaagagtgctatgaaggtagacggcaaagcatctccgacttcatcaatctggccatcgactatgaccgtgacactgaccggaaacgcatcgccgatcgccttgccgagatgggccactccatgcagcttctgtccgttatggaggatgccctggtgctcgtgaaggacacgccgcccaatggaggcacctatttcaacatcctccaggcaaggtactttgatgtctactgcacctcaaatgaggaagcatatctcaacctcggaatctcctcatctacatactatcggcacatcaagccagctatccgtgcctatgcggcaagcctctggtgtgtcgtaatccctgatctgatcatcagggagcacctgcagcaaagcggtagcgtcaccgctcaggtggaagtctcgtgagagacaaatgagagacaatgtggcagtcagatgagagaaaacatgatagaaaattgggaggaaattgagagccaaacgaaattgtagtgtagagactcagccggtataatggattatgctggagcacctatagcctctcgggtctatgatccgaggggcttttttcatacccttgtgcgccagccaataccggaacaaagagccgaccattctcgaaaacgagagtggccggcttttttgttgccctgattgggagcgtaatccatgtcaagagccagctactgggcccgtgcgccaccttcaagtcgttcgtccgcatccgctaatgaaacgacttggaggtaacacatgaagacaatcaaaatcaaggactactatggcatttatcaggaaattcccgtcagcgatgagctgtacgaagaatggcgtgcgctgcagaacgaaactcagcgtattcatcgaaaggaagtatatcaccgcgactggaccccgatggacgatctggaggaaatgccgcagcactttacgcttaacgaacttgaggacgctctgatctgggacgagcaggtcgtagagctctatgcggcgatttctcagttgacgcccatccagcagcgccgcatccgtatgctcatggatgacatgtcaatccgtgagattgcaaggcaggaaggctgccatatgaacgctgcattgaagtcggtcaacggagccctcaagaagctccggggacttctgcaagaccactaaactacacgcagaaaaacattttgcgtagttgttgttctaagaaaacactatgcgtaaatactaacagacgcatcaagcggggcttcccgtctcgctttgtttcaccggataaggaggtaaatttccatgattatttctgtcgatcacggcaataagtcgattaagactcccaacgcgctgttcacttccggcctgattgtatccgaggggttccagggcttcaaaacggactacatctgctggaacaacaagtactatacgctgacagagcagcgcatcgcctatctccgcgataagacggaggatgagcgtttctatgtcctcaccctctttgccatcgccaaggagctggagcgccgcaaggtgcccgagaccctcgatcccattgacatcaccctgcttgtgggtctgcctcccgcacactatgagcagctgcacagccgtttcgagcagtacttcctgcgccgacgcgagatcgtggattttgagtataacggaaagtactactcgatccgggtcagcaaggtactcagctatccccaggcatttgcggctgccgttacccagttcggcacgctgaaggctcattccgtcgcctatatcattgacattggcggctttaccatcgatgtcctgaagctgcgcagcggccatccggatctggcggtggtagagagcttcgagaagggtgtcattaccctctacaacggtatcgcaagcaagtgtaatgcgctctatgcccggatcctggaagactgcgatatcgacgaggtcatccgaaaccaacccaccgtccttcccggcgaggtacagcagttgatccgtaccatgaccagtgacttccttacggagttctacaacttcctgcgtgagcgaggcgttgatgtctccaccagtaaatgcgtctttgctggtggtggttccttgctcctgcgtggaatgatcgaacgaggtaacaaagtagctttccccattttcgtcgaggatattcatgccaatgctcgcggctatgagctcctctatcagagtgaggtggcggcaaatgggcagcaataaaaaggcccgtgtggtccttcagttcaatgagatggacttccggcaccggcgtgctctggaaatccttcgccagcgaccacgcagtatgtctgaactggttgtaagcgccatactacactacaccagctgtcctgaggttgctgatgagcatagcaaggagtggattgcaggcaccgtgaaggagatcattaccgaaatgatctccagcggcgagttgcagatctcggcgcaaactccggctctggagacaaatggatcaagccttgctgcagatgacctcgccgagctcggtggcgttatgggaatgttccggaccaaggggtgagcatatgagtaacaaacgctttggttacgctcgcgtgtccaccacggatcagaatgaggaccgacaggttctggaactcctggggtctgggatcgaagagcgtgatatctatgtggacaagcagagtggccgcagctttgagagaaccaactatttggccctgcgcaacaccatcttgcgaaaaggagatgtgttagttgtcaaaagcatcgaccgcttcggtcgcaactactctgccatccgcgcggaatgggagttcctcacaaagactcttggtgttgatatcgttgttctggacacccccatcctcgacaccacccagtataaggacctgcttggcagcgtcatcactgatatcgtcctcgctgtgctctctttcggagcacagctcgaggtcgataccaagtctaaggcacaggcagagggcattgccgctgcacacctgaaaggcgtcaagtttggccggccacgatgcaccgtcgaaggctgggatacctactacccccagtggaagcagggccaaatcaccgctgtccagtgctataaacagctcgggatcagcgcatctacattctaccgtcttgtacggaaatatgaattggaggacgaaagcgaatgagtcgttgttgcatatattgccgcattggcggcaccgcaaatgaacccaaccaaatagccatgaacagccaacttgagatgctgcgaaaggctgctgaggatctcggccttaccgtcgtggcagaagtgactgtttttgaaagtggcactgacccgcagcggcagagcatcaaaacgctgatccgagatggaaaacacggcgcctatgattgtgtgctgattgttgatccatccagattatcaaggagcactgagggctgcaccttgattggccagaagctgaaccggcatgggatcagagtctatacccctcagggaaagatccagctgcccccgcctcacgccttcttctattccagataccataaggaaggagaaaacgattttggcccaggaaagtaaaaacgagaatcgcaagcaaaggatccgcgaggcgttccatgatgggaaacaggtagagcgaatgcctgcccgagaggacatggctcctcagcattccgacgatgttatctatcgggttgctccgtactgccgagtcagtacgatgtccgaaatgcaggcggagagttttgaaatccagcaacagtactacaacgagtacattgccaagcacccgaattggacgctggttcgcatctatgccgatgaaggcatctcagcaacttcggtgaagaaccgcaaggacttcaacaacatgattgaggactgtaaggccggcaagatcgacctcatcgtcacaaagtctgtcagtcgttttgcccgtaatgtcgtggactgcatcaagtacgcccgtgacctgagagccctatcgccacccgttggcatctactttgaaacagagaacatcaacacgctatcccaaaatggcgaactgctcctaaccgttttggccgcatttgcacaggacgagagcgtcaacaagtccatcagcgttgcctggggtatccgacagcgatttgctaagggcatccccaaactggttaagccctacggatatcagaatgatgatggcaagcttgtcgtggatgaggaggaggccagtgtagttattcggatcttcgccttctatctcgggggtaaaaccccatatgagatcgcaaagatactgacggacgaaggtgtccccactcccacaggaaagaagccgtgctggactctctcttccgtcacctacattctcggtaacgaccgatactgtggagatgtgattatgcaaaagagcctatgtgtagacctgttcgctcacaagcgcgttcgcaatctgggccaggtggaacggtaccggatgcgtgatgttcacccgcctctgatctccaaggaggagtggcgtgaggcaaagaaccggatctctatgcccgatcgcgaagctgttattctcgaagaaattactggagagggaattctctcctcactacatccgatactattcaaggaggacattgatgtatgaatgcctgcatgtctgaattccgcattgtcaacccgacccttcgcaccttcagcgccgctgaggtgcgcatcgcccactcgagcatccggttcaataatctgagtgccgctgagttgggctatccggagcatattcgtctgctgatcagctcggatggctgcacgctggccattcaggcctgtgatccgaaggacaagtgcgccgtgccctttatggccggtcgcactgccgatgatctgaaaggtcaaaaaaagtggacgactgtgagtaaccggatgctcacccacatcatccggagcaagctgggctgggaaaccgcgaagacgccgcgccggttctatggcgtgccctggcctgagcagggcgcgatcatctttgatctgaccaagattgcaccgcctcgtacccggaccccgaacctgtctgcggaagatatgctgcgtgcctatgaactggccgagtccggcgctctgcttcctgttatggcccccgcatggtcccgacagccctttgcttccgtgcctcccagtgaagtcatcgaaactcagtatgtgcaagtgagctaacaagaagcccccggcatccataacgatgtcgggggccttcaacctcttgatagtgaagaggaaaaatggtattgtagggtatatccgttctattggacagcgagtgcgatatctttaggtaagctggacctttggcatccggtcctccatgagctctactttcctgagcatcaggtcgtagatcatgccacggaattcagcatccgatatcgactcgttatttgcctcatgacagaccttcaggagcatttcatccagttcgccaacagtctgcgctttcggatactcctgcataatttcctttgtcaccatcagcaggaactcgaaaccgggtaatacggattggttcatcttctctactcctcttacgtgttctttacaggcgattatagagggatttcaaaacaaatcaagtcttgactttttcagaaggaggcatcgcaagtgatatattgtatgtccgacatccatggcgagttggatcgcttcaaggcgatgctcgacctgatcaatttctcttcagacgatacgctatacatcataggcgatgtgatagatcgccatccaggaggcgtggagatcctcaaaatcatcaaggacacaccgaacatgttcatgctgctaggcaaccacgagcaaatgtgtctggatacccttggtcccaacagtgtgtatggaagcagacggctatggcaagagaatggtggaatcagtacatatcgagatctgctctatgtatgttcgcccactgagcgaaacaggatcatacatttcctgagtacgctgccggatcatttcgatgttgaggttggcgaccgcaaattccatttggttcatgccatgccgtcagatgacccggatgatcggatttggaggaggcctaaaccggatgatcctccgtacttcgaggatcgcatcgcaatcgtcggccatacgcccacctgctacatgagtggcgatatggaaagccccttcgccatctggcatggaaatgggctgatcgatatcgattgtgggtgcgggaataagacagaactgcggcgcctcgcctgccttcgactggacgatctgaaagaattctacatctaataaccaatcaacatgaggatgccctctgcttatactgctagaaggcgtcctttttcttgtcagcgataattcctgcaatcgtactaatttggtattatccgtactgttctgctcatttttgagtcgccgttaatctcctatacttaaagaaagataatgataggtaggagatgttcaatgagcaccaatttacatgtaatgggcaaccgaatacggactgcgaggcaattcaggaaactgactgcggaacaactctctgagcagcttggcattgccacggagtctctgcgccatatcgaaaatggtaccagacgacccagttacgctctgttagacaacatttcggatatactcgatgtgtccctggattacctcgccggtaaaactgaacttcccctcgagcgcagagtacgccgggaacttgagaatatgggcctgacaaaagcccaagaggacgcttgtgtggagatcgcactcaatgcgatacctgtcataaagcgaatctgctaagccatgcacctgccggttttcggtaggtgcatatctttttttgcgcactccccatgattcgacaagttttgcgcttacttccccttattatgtacttatctggtacgattagtatcaatatagtacaaaggagatagtaaaaatgagcgtagcaagtatgctggaaaacatgaaaaggcgtgccctcgactccacctacgacgcatatatctgcgaggagtacgatgcatgggcagtagagtcattcgcaacggaagagggcgagtatgatgcggcaagattggagttgcccaaagtgctcagttccgagcaaatggagaagttgaagacgatggaagagcgctatcggcagaatcgcaaatacgcctcccactatgggtttgaagcgggcctgttctctggcttccagttgttcttcagtgggaatgggataacagaggatggcttcgatcgctacctcatgaaaagccttatggagatgcccggtatgcagcgccatgtagactactacgcccgcaacgacgagattctccgcctggggaaggagctgagcgaggagctgtcggatgaaaacaaggagcatgttgtctcgttggaatgcgcttggggccaacgcattcactcctttgcctgccacgctttctattgtggctatcgtgcggcgctgagggttattgacgcagtcggagggcttgagagcatgagtatgatcgaccacacgcttcttctggaatacagacttgggtacatcggctcctatgaacaggttgaacgggagcaggaacggaagaagaaaaccgcataatagcgaaaggggcaggccgcaatggcctgcccctttcacataagctctcgctgtaattctgctcgatatcgaatcgtaaaacggaacatccgttcctcttccaatgcaaggatctcgttctccgctttatcaagcgcagaaatcagctcttccggcacgccatattgtcgcaggttttctgcaatcttacaaagtttttccacggctacctcatattcacaagatgagttcccgccatgctctgaaacaggaatgcattttccttgaaacagcttttgcaatatgttcattttgatcccccatatatgagacaccaaaacagagaaagtgcaacatagtttttgaaaaaaccacggcgttgtactgtaattactaccttcccgcagggtacacatatgtgctgtccgttcttttggacaccctctattgtatgctatggccataatccgataggtctcacaaaggagaggtgacagagatgtatgttctgatcgatatggagtgggttacaaatcgacacggaaatcactggccaacacagcttgcggcaatccgtgtagatgaagaatggcagacggtggattccttctctgtactctttcggcccaaggatatcaccttccagaagtgggatcacatggccttctccggttggactcgtgacaactttctgaatgcagattcgctctatccggcacttgacgcctttgagcactggctacagcccgaggacattctctgctggtggcaccaggaggcctatgacctctatatcatgttcaccaaggtagcacagatccgtgatcgggtctctatggtagtattcctctccgactacatctacgggttcctggccggtcagaaaggtgccgtaggaagtccctacaagatttgtgcggcaagagatatcccgacgccagaacctgcacactgttccatcaatgatgttttggcgatacagtctctcgttcaaagcatcgatttccagcaaagaaatctgcaggcgccacccaagaagtgggtaaaggacaccactgctctgaaaggatcaccggtgtttccgcttctctacgatacctcaacccagctgctgcaccactctgattgcgagctgcttccggataaccgttacctgccggcatacacttcgtttaaggcaccgatccggaagaggtataaaccctgcgcctgctgccatgatgaatttctggatgcgctttgggatcgtaaccaggactctatcacccgatctgattacaattatgtgtattccaagcagtccaaggtgtttcatacacgaaactgctcccatgtgctgctatcctttgacattcagggtaccgtatcctatgagacctgcttgaagagcggacgccggccctgtaaacattgtaagcccgtgccgatagagcgcaagcgtatttctttgccgataaagcaaaacaagccgcagaaagcggaaaaccgcaatctgaacggcgaagaacgaaaggcacttggtcggttcaagcgagctaaagaagaacgcgaaacagctttcaagcgcggcgatttgacggaggctgagcgcaataccgtcatggccctttcgcaacccggtcttgctttctgggcaagcaaggggtatagcaccttccacacaagaaactgctctaagattaccgggctcaaccagctcaggggttttgcgcggtatcaggacgctgtgcgagccggctattctccttgccgccattgcagacccagtcccaagcaggatgtaaaattctcaattcctatcaccaataaggagcgacacggcgagactacggacaccctgattcagctctgtacgcagcactgtctgcccttcgaatatgacatgcggtatttcacgctgcagaccatggccggcaagtggcgtatcgacatgagtttgcggcccgttcggctggagcatatcaatctcgtcaccgagcgcgggaacacaaagaagttccatacacagccccgtctcttcctctccctcaaagacacctttgattacatcatgcgccatgacagcaagttgattgaagagattgttgccaaggacaaccagagccaggagctggcaatgggttaagtaagaaaggcgcggcaatgggtagctccatcgtcgcgccaatttcgtttgattctgttgttaagcaatcctgtcatccgtaagtggtattgggagtatccaaactcctgccaacgaaaaggagtgaataaaaatggacagagaagaagcagcaaaagagttgatggccatgctcgaagaagcacaagagggcccatactattctgaggaagaggtgcgagcccatctgctggaaatcctggcccctcgcaaccaagtatatataactggcgacacccatgggcaatttgagcgcgtgatcgagttctgcgcacgcagagaggttgaaccggaaaacacctttgtgatcttgggcgacgcagggctgaactactacaatgaccgcagggaccgaaagaagaaagaccaacttgcccaggtacccatcaccttcttctgcctacacggcaatcacgagatgcgcccgtccgaagagctcggttatgaggtcgctgaatatcacggtggcaaggtatggatgcagccggcttatcctaatatcctgttcgccattgacggcgaggtctatgacttcaatggcaattcctgcattgtcatcggcggcgcctacagcgtggataaatactatcgtctggcccgtggttggagctggttcccagatgaacagccttccgaagaaatcaaagccaaggtggagcgcgtcctcgccgagcgcagctggaagattgatatcgtgttgtctcataccggcccgttgaagtatgagccgaccgaggtctttctgcccatgatcgatcagagcaccgtggacaagtctaccgaagtatggctggagcagatcgaggcgaaactcgattatgagcgatggtatttcgcccactaccacaccgagaaagaagtggacaagattcggatcatgcataatgactacactatgatccctcgcgaagcctccgttgcggcagaaaaggacatgcttcgccgcatgcatcgtcaggcggagattgtggaagcgctgggacttctggatgatgcaccaaaccaaaagaatggagatgatatctcatgagcacctattatgatttcatggtcgaggccaagtacgagggcaagtggtacaacatcgacttccataccaaggatattgacggcaaattgcgtcatcagtacctcgccaccatttcacgcagctttattggcttgctggaggatcaggtgaacggagcatgggccattggctttgatgacttggctgagagcacgcagcagcttttacttgcaagtacttttgaaggccgagaggatagtcttcgactggagcgcttctatgtagccgggaatctcgatgattttgaacggctgctcaatggcccgtaccagatggaatactatgtcacccgcaaccagattgcagcttatgaagaacacaagattgacgaaatttacgaatacctgaccgctcacgagttgctcgaattgcctcaggctacccgaaacgagtatgtgctctatcgctggaacgacacctttgcaaacacagagaacatccgggctatggtggagcgcctgaagtatcaggttgagtgcttcaatgatgcgctcccttaccgggcgggtcagtcctatggtgatcgggctgcctctcaaatccgtgtgatctaccgtatcacctaaggagggatcggatgaattattacattggagatttgcacctattcaaccgcaaccagacagatgaaggcagaaactacgacagacgcccgttcgctacggtagaagagatgaaccagtacatcctcgaacgctggaacgccaagatcaacaacggtgataccgtctatatcctgggcgatatggccatgcggggtaagaacagtgcactactcgcgctggttgcccagttgaagggcaagaagattttgtttcgcggtaaccacgatgacctgtccgactatcgctatcagcggctctttgaggaaatcactgactaccgggagattgccgattcctttgatggaaagacatacaagctctgcttgatgcactatcccatcctgatgtggaacggccagcatcgcggatcgattcttctctacgcccatactcataatactgtggaagaggcattcttccagaaatgcgtcaaagagctcaacgagaacaagaaactgaatgttcaacaaggaaagcccattcgcgccatcaatgtcggctgcatgatgccttacatgggctacgagccgagaacgctgaaagaaatcctatccgcgcatgaataagaaaggagtgctgcctgtgctgccaaaagcactgtttttgagcacgattgagaagatacgccagcaggaggctcgtattgatgagttcgataaggccctcagtaaaatgtgcgatggttttcctgccttcgacaaggacaatctctacctgctcgcactgcgcgatttgctgaagtacactatgcaagaccagtatgacaatatcggctggtggttatacgaagcgccggatgccggttacaccgtatcctgggaagaagccggcaaggaagtctctgttgatttgactgaggccggcgccctctatgtaaagaagtcgagatgcgagtttttaatttataaacaaaatgacgataatttaaatcgaaaccaaagaaaaatcgaatataacaaaacgaatactcaaaaatagcaggaaagtgtgaacaaagatcgctgattttgtaaacgttggcactcgtatattgacattgctaaaaacggggttataatgaacacgatcttagggagagggataaagagatcccccccaagagatcaaatcaaattataaatactcaagctccggaccgggagcttctcccggaaccgagagcgggaattgaatggaggaacaatttatgttacccagtatttttagtgagaacctgtttgatgatttctttaatagcgcaatgttcccgaatgccgaacatgagctgtacggcaagcatgcgaagaacctgatgaacaccgatgtgcgggaggtcgagaacggttacgagattgacatgaacctgcccggttttaagaaggacgaggtagagatccagctgcaggacggctgcctgaccgtcagcgccgccaagggactggacaaggacgaggaggataagaagggccgttatatccgccaggagcgttacgccggttctctcagccgcagcttctatgtgggcgaggatgtggagcctcaggatgtgaaggccaagtatgagaacggcgttctgaagctgttcgtccccaaggccgaggtcaagcaggtgcctgctcagaccgctatcgccattgagtgaccaaatggccggggcccgcaaggacgggtcccggccggtttcttttaacggcggtcctgcgtcgtatttccgtccgggttccgggcggggatacgaaacaagatcgaatggatcgacgggaggaaagttggatccccctctttttccttaggaggcatgatgtatgaataaaaccgtttcccgcgtgctgtggatcgtggcaggtgtgctgctgatcgtggcgggtggtgcatgtatgctccatcccggcgctgccctgagcgggctgtccttcctgttaggaatggccatgttattttccggtgcggtagatattatgatttttgccacggcgggcagcagtatttacggttccggatggtttttggtggatggcatccttacggtgctgctgtccatcttcctgctgtgcaaccagatgttcaccatgatgaccctgccctatattctgggtatgtggctgttgttctccggcatcacgaaatttgtaaactcctttgatctgcgccggtttggagtgcggggatggggctgggtgacagccttcggcctgctaatggcggcggctggattcctctcctttatggaccccttggctgcggcggtgacgctgtccgttctggcggggctgttcctgatgatccagggcgtggtttccatcgtgttcgggtgtctgtccggacggttctggatgtaaagcttaacaacaaaaatccatggtcgcacaggctgactatcttgttgaagaggttgcgcatagagatgccttgaaggcagtgcacggcagtcatgactcatgggaggaaacacaatgagtacgcaatatgaatttatgaaacgacaggtcgttgaagaagtggctgctcttcaggaaaagctaatcgcaatccaggcggattgcatcaaccggatcaaagaaatccccgtcacttctgacctggaggacaccatggatgaactgcttaataaaatctcaaatcagttcctctttcagattgaggaaccggaaagtgcgtccgtcgtgatcggcacagcaagagccggtcatttttcctggagagtcgagaacgggtttcgagacattttctccgtagagcagtggctccgcgacaatcccgagttcagcatctatgatgaatacggtacagctattacatgggagcaattcaaagaggctgtagcctggtgtaatgggtgaaaactgcacttgaaacggtttgtgcattctgacatattgggaccgcattttttgtacaaggagtcgatgaccatggagtacaggggcctttatgtttctgcaacgccagattgtgagcctaatgaaggcggatactattgtcaggtatatgccgacgaggattatggcgaccagatcgacgacttttgtatccatccagatgagcttgaagagaatgatgatattaagcactggggcaaggtcaatatcgacggcagctaccgatactatgttgagaatggtgtcatctctccagaaaacagcgatatttaaccacaagttgaatgacaaaccgaaagagttgtggtatagtacagtcagaaaccaagaacaaatctctacagaaaggacgcagaactatgaagactatttcttccgctatcttctatatgagcgaatggcaggctatcttccagtgcgaggaatatagcttttgcgaagcacgcccatatcaagataagcagaagaatatgatcggattgagtacctgttgacctgaaagaatcggtctatcaggatctccttctctgaattattgaagccgcttgtcttgagtgcagacaagcggctttttcatgcccatgaggccaaataattcagataggaggtgtatttgagaatgaacattccaacgatcaaccttgctcgcacaggcaccaatattgtgatgcttcgcaaagcagcggggctgacggtgcatgacctacaaatggcattcggcttcaattccccgcaggccatttacaagtggcaaaacggcactgcgctgccgactgtagataatcttatcgcccttgctgcactgctgcatgtgcgtattgatgatatcctcattaccgatcactcggttgcttaatatgcagggagaacttctccctgccatacggtccgctcgtctaaatggttaggacacagccctttcacggctgcaatgaccggttcgagtccggcgcggatctccataatactgggatattgctaagcggctaaggcaccggcctttgatgccggccactgttggtttgaatccaactatcccagccatgatacggtactcaagaggttgaagaggacagcctgcaaagctgttaatcgtcggttcgaatccgacccgtatctccatctggtgccttcgtctaattggttaggacgcaagcctctcaagcttgtaatgctgggttcaaatcccgcaggcatcaccatcatcatacaggggtatagtttaaccggaagaacagcggtccccaaaaccgcccgtgggtgttcgagtcgccctatccctgccaatatactggggtgtcgccaaatggtcaaggcaccggtctctgacaccggcatttgttggttcaagtccagccaccccagccatatttggagagtgaacccggaaggcccggggaccgcccgctaagcggatcgtatcagaagtgatatcagattcgagttctgcgctctccgccatatgggtcagtgcgcgtagttggcgatcgcagcggtctgtaaaaccgtgacatctgaaacatcgttggttcaattccaacctgacccaccaaaatagaggggtacccgcttctgggtgcccctctttcataatggtcacatcattggccgggtggtcgtaaaacagtaaaatgaaaaaatggtgaaaaccttgagttttcaaagggtgcggcgtgacttcggtcacgccgtttcctctttcatcagctcattcagcgggatgaagcccagcccatcgtactggatgtgaatgtgctgcacacgcttcccgctggatttgtccggtgcgtccacatagatggcggacaccagttcccgcagagcgtagccgtccagcttatcgatgcccacatacttgtgcgccgtctgaatgaacttctcaacgttttcgttctgtcgttcctgtacttcaatttcctgtcgcaaagttacgcactcggtctccaactgcttctgctccgtttcataggtcaggctcagcatatcgaagcgctcatcactcagccgtccgcaggcgttgtcctcgtaaatccggatgaacagccgtttcagttcagcgatgcggttttcgttccgttccagccgtttccttcggatgcggatctgctcactgctttccagccggagttgttcctccatcactgcacggagatgtgcctcatgccgcagaatgtagcccgtcacagcctgaatgtgtttcaggactatgtggctgagtacggtttcccggatgtaatgagtaccgcacttgtccttgtgcttctaatggagagaacagtcaaagaacgcgccctccggtcggtaattgttcgtcgccccttaatacagcttctcaccgcagtcggcacagtacaccagcccggaaaagatgctgcttcggcctgtacgggtattgcgatgccgctgctggcgcacctgctgtaccttctcaaacacggcttcctcgatgatggcctcatgtgtattggggaagatggcttgcttctcaaggggattgtcccgctgcttcttgtcccagatggagttggtataggtcttgaagttcaccgtacagcccgtgtactcccgccgttccagaatcgccacaacggtactgctgtgccagtcgcaggggtcctccggtttcttgtttggggtcttgatgccctgcaaggccctgtatgcgctgggcgttagcaccttgtccgctttcagttggttggcgatctgcatgggaccacggcccttcatacacaggtcgaagatgcgtttcaccacatcagcggctaccgggtcaaccacccagcggcgggggttctccaggtcttttacatagccatagggcacattggtggtcaggggtacgcctcgctcacccttggctttctggacggctctgatcttgcggctggtgtcccgggcatagaactcgttgaaccagtttttgatgcccgcaaaatcgttgtccacacggttagggtcaatggtgtcgtagttgtcgttgatggcgatgaaacgaacaccgttctgcggaaaggtgaagttggtgtaaagcccggtcagcgcggagttgcggcccagtctggaaaggtctttggcgatcgccacggccacccgtcccgcctcgatttcggccagcatggcctgaaagccgggacggtcataggtcacaccgcttacaccgtcatccacgaaaaaggttgggttggggaagtgatgctccctggcatactgcaaaagcatggacttctgagacgagatttgtcaaggttattttctcccgctgaatacaaatgtccaactttactgtgaatagctcaaatataataaacacagagccgcagaatggccagggtttccatcaccgccgcaatgattaggatggtgtttcggttttctccggccactccgatgtcaatcatactggccagggcagtaggcagcagcatggctgtcacagcggagagcagcatcagcgccaagagggcggccacatgctttccgctgagttttacacgggaaaaaatcgtacccatagttttcctttctgctcgtcgtactcgcattttagcttgacagggcaaatagcaaatgatagtataaatgaaacgatagtatcatagatgctatgaatatcacagaagcaggcgttgtcaatagtccgagcgaaagtggaacaaatgacaatccttgtttcaatgatacgcaattaaaggagacgtttcttatgcgaaggacaacggctacaacagactatctgaaagaatgtatgggtacagcgttgctggaactaatgaaagaaaaacccattgaaaaaatcagtattgaggagatgactgccaaggcagatgtaggtcgctccacttatttccgttatttcaaaagtaaagatgaagttctgtctttcaaaatcacatgtctgtggaagcgcttttccgacgaacacggtgctaccaacttcgccactggtagttatgacggcatcaggctgttttttgaattttgcctttccactcgtcctatttgtgatctgctctactcagctgatcgccaatatgtgattctaaacttctatttacaagaagcggcatccattgtcgctaatgccgatgccaaaacgcactactttatccaatttattacatatggattgtttgggcttatgaatgcgtgggtattacgaggctataaagaaaccccacaggaaatggcacaaatagtttgcgattgggaagcatcttcggaggagaaataacatagaggggggtaaacatatgggaaaaatcattcgacgcattctaacaattattccagcggtggctttacaatcgctctggcttttgctgttgatgaaatggctgaccccttacgcaccgattattgtgtcactgctttccgttgcagcgtttttcttggtggtatttattattataaagagagatgaaaccgcttataaattgctttggctgctggttattctgtcactacctttggtaggagcgttactatatctgctctttggaaataaacggacggcccgccctctaaaaaggcgcttgcagcaagttcaaaagagttgcaatccgcagcctcttccaataaaagaagcgccctttgacggcgaaaaacgcatggggcaaacagtgcggtggctggaagaaaaaacgcaatatccgatgtgtgcagttgagcaggttcgttactatccgttgggcgataatatgttccctgatatgcttgccgatttgaaaaatgcaagaaactcgatttacgtagaatacttcattattgagccggggcatatgtgggacgcaatcgtgaacgaactggaagtaaaaatggagcagggcgttgatgtacgtgtgatatacgatgatcttggcagtatttcttcgttcaatttcagtaatgtccgtgaactgaaaaagaaaggcattccatgtattccttttaatcctttccttgccttaaaaggaactgcaaactatcgcgatcatcgcaaaatgctgattattgacaacgaagttgcttatagcggaggtatcaacttatcagatcggtatatcaatttggaacatccctatggacactggaaggacacaggctttcggattactggtgagccagtaaaaaattttacccatatgttcttgaccttttggaacgcattttcgctggaaaaagaagcaggacagcttgcaatgcccacatatcccaaaaggtatcctgcgccgccgcacacatttgatggttatgtgcttagttactacgattcgccccttaaccatgaagctaccagtaatcagctctttattgacttgctttctcaaagcacggattacgcatggttttttacaccgtatcttatgcttggcgatgacttgatggatgcaatgatttccgctgctcaacgtggtgtagacgtgcggatcattatgcccggcatccctgataagaagctgattttccgtatgtctcggagcttttatcaggtgttgctgactggcggcatcaagatttatgagtatactcccggcttcgttcatgcaaagagctttgtatcagacgacaaagttgcgacgataggaactgtcaatctggactaccgcagtctctttctccactttgaaaacaattcgttcttttatcgttccagtattattgcagcaataaaggacgatttcatcgctacacaggcaaaatgtaaagaggtaaagccctatgatatgaaacattattcgcgccgctgggtcgtagatggtgtccttcgtattttcgcaccgctatgttgaggtttttatgaagcattttcttatgtgtctgctatatatcgcggcgttaggggttctctcctttgtagtggggcgcttgatcccgaagcattggtttcacgccgatcgttttccttgggtctgccacccggcagagcaaaaactatggaagcggcttcatgttcggaaatggcaggcaaagatccccgatatgagccgcatattcgttaaaatcatgccggaaaagaaactgacaaaggaaaactatgagaacttgccgcgcatgatagaagaaacttgcgtggcagagtggacacatattctgttgtctatcgccggtcttggactgctgaaaatatggtccggtgttggcggggtatgtataacgattatctacattgtgctgggtaatttgccgtttattgttgtccagcgctataatcgcccacgcctgcaaaagctgtttgctatgcagcaaaggaaaaaataggagattcaaatgcaaacactaattctaagctgcaacactggcgcagggcataactcctgtgcgcaagcagttcaggaagcctaccactctcgcggagaaatctgcaatattacagattctttgcagtttatttcagaaaaagcatccacgtttatttctaattggcatacccgaatttaccgccatgctccaaggctttttgatgctgggtatcagcgtgcggaatctcacgaagatattttttgtgagggaacgccgatctataagctactttcctccggcgcagagcggatgtatcaatacatccgctctgcaggctacgataatattatctgtactcatgtattcccagccttggcgttgacagaaatgcgccgacagcacccatgcttacagcttgtaacgagccacatttctacagactatacctgcgctccctgcacagcggattctgcgctggactggtatttcattccgtccacttcgctgttaggtgagtttgaacaatgtggacttcaacctcaaaagctgatcgccagtggaatccctgtgcggcagcaattctaccagcgtgtgtcacaagaagcaggaaaagccaacgccggaatctctcctgctcatcagcatattttaatgatgtgcggtagcatgggctgcggtccaatggaggagattatatcgtatctctgcccttacctcacaacagaacaagaacttagtgttgtatgcggcacaaatgatgatttacgcaaaaaactccaaaaaaggacagaaaagtattctcaagttcatgttctgggaaccgccaataatgtgccgcagctcatgcaagcctcagacctattcctgacaaagcccggaggtctaagtacatctgaggcaatggcggcagagttaccaatggtgcttatcgatgcagtggctggctgcgagacacataatctgaatttttttctgcgtaatggaatggccgtcacagccaatacgccaaaagcaatcgcagacaccacaataaaaacgctaaatgccccagtgcttctttctaaaatgcgcgcggcaatgcggtcgcagacggaatgtacggcagccgataaaatctatgaatggatatacagtcatgcaaagtaatcatataaagccggaagttaattaccgtgagttccgcatccataaacttaatacacctgaattttctcacgtcaggctattgctttactggccaattttcggcttgctgtttttgtttcttgagcggttgcaaccgcaacgaaattactatcccgtctattgtggactcgatgatataataccattttgtgaatgggcgttgattccgtatctattttggtttgtctttctaatcggtacgttggtttatacttttttcgtcgatgtacctgcatttcggcgtatgatgtattttgtgatagtcacctatacgatcacggttttgatttacctgttctttccaacctgccaaaatttgcggccagaagcatttgtacgcaataatctacttacacgctttattgaattattctatagtttcgataccaatacaaatgtttgcccctcacttcatgtaataggctctgttgccgcgatgtttgggttatgggattgcaaggcgctccaaagcgtcggatggaaaatcgctgctacatcaatcgccgtgtgtatcagtctctccaccgtttttatgaaacagcattctatcatggatgttctcgctgcattgccagtctgtttctttggttggtggattgcctataagatactccccaataataaaacaaaccgatttcttacgaggatgtaatcatggataaatcctacaaaaagccgcttctactaatcacgtttggggtgatcttatttgcggcattcaacaatctaaactatgttgccaactttctaaaatcgtgtattggcttgctcgctccgattttatcaggccttttgctggcctttgttctgagtgtacccgtgcgcggactggcaaagaggcttcgacgaaagctgactaaagctacagatcggcaaatagacatgataagcctgttactgacgctgatatgtgttattgcgattattgctcttctgtgtgtaattgcgattccacagctcactgcatctgtaaaaagcattgctgctcttgttcaagaaaaatggcctgactgggtcggcttattgcaaagatacggcattgacacagagaaactgtcggcacattttgctgcgctcgattggaaatctattctgcaaagcatttcgagcgaaatgaacacagtgatttcctcagttgccaatgttgctggctctacggtatctgcgattgctgatgttgcaatttcacttgtgatcacattctatgtgctaattggatggcgtgaattgagcagtcaaagcaaacgggcactgtatgcctactgtaaggaatccgttgcagatagaatttgccatatttcgaaacttgcacatgacacctatgcgaagtttctttctggtcagtgtgtcgaggttatgattcttggaacattgatctttctttcgttttctgttgcagggattccatatgcggggctaacagccgttttaactgccgcctttgcattcgttccttatattggaggatttctctcctgcgctttcggcattttatttactttattggcggctccgaacaaggcgctcctatgcttgatcgtctatcaggcaactcagtttgttgaaaatcagttcatctatccgcgcgtcgtgggaaacagtgtagggctatccccgttctggacgttgttggcggttttgctgggcggtaaactgttcggtgtccttggcatgatcttctttattccgttaatggctcttgtatctcagcttctacacgaatcaatcgaacggcggctgcatacccgcaaaccggagctgtccaatgtacaaagcaactcagacgagaatacagacatatctcaatgatgtagcaggcgttcgaatagtttgtgcgtttattgacgataatcgtctggatgaacagatccgccaggcagttctttcattggaaacaaaatggacagaaaaagaaattggttttcaggtagaattggaggaagttaaatatactgcgaatgaaggactttttatgcatatctggataaatcttttagataatgcgattaagttcagcccttcaaaggggacaattacgatgtttctgaaacaagaacaggattctgttaagttcattctggaagatgaaggaccaggaatagaggatgatgtaaaatccagaatatttgacaagttctatcaggtagatggatctcataaagcagaaggaaatggcctaggtcttgcacttgtaaaacggattgtagatagtgccggaggaacaatcaaagcagaaaaccgtgaatatggtggatgcagatttgttatagagctgccaaagcagaaagatgagattatctagttttaagataaattagaagatgggagtatttatatgacattttatcaggagttgcagttaaatcaggcaggttctaaaaacctgttgagaaagagtgaaacactaaaagaaaaactatatcatatgtgggtatatctggtgaagatagctgctacaatggcattttgttttttctttgttagtattttcagcatcctatttggaaatgagaacagcattgtaggtgtagtagtcttattatgtctcatggtgtttaggaatgcggatctggggatccacaccggacaatctacgatgcttttggctttgttctttgtaattatgactgtatgtccgcatttagcaaatcagttttcaccggtattgggaatgctgttaaatattgcggcactggctgtgttgattctgttcggatgccataatccatccatgtttaatcaatctacattggttcttgggtatctgctgctatatggttatgatgttacgggaaaaagctatcagatgcgattagtcggaatggctttaggtgcagcacttacctgcttcgtattttatcgaaatcataaaaacagaacttataaaagaaatctgaaagatctgatacaagaatttgatatcacttcttccagaacaaaatggcagatatgtcagattttatgcgtaccgattgtcctttgcattgcagaactttgtaatatgccacgtgcaatgtgggctggtattgcggccatgtccgtgattttgccgtctatggaagatatgcactacagagtccgtaaaaggattgtcggaaatattgcaggtgttatatgttttacagtattatattttctgcttccttcgtcaatctatgcatatataggaattcttggtggaatcggtgtaggattttcagcacaatatggctggcaggcagtatttaacacatttggtgctttagccattgctgcagagacatatggactacaaggagcggttagtcttagagtgagtcaaaatgtttttggtgttgtgtttgctttagcattttgtgttatattttattggtttatgcctaaaaaaaaggaaagtgaggtgaccgtacatgcagagtgaagtgaatcagaaagaaaatttgaatagaattattacggttcctaatcttctttcttttttcggctttgtctgattccggtaattatatggagttattgtgtaaagaaaaatcctcgaatgaatgcagggaagtgaccgaaaagtaccgcacaggacggagtgcatatttatggctcggacagttgtttatgagattgtttgcaggactattatagcagaaagaagaggtgttcgatatgtgtacagcagcaacttacaaaacaaaagatttttatatgggcagaacgcttgattatgaattttcctatggggaacagatcacgataacgccaagaaattacgaatttgatttccggtttgccgggaagataaaaagccattatgctttgatcggaatggcatttgttgcaggaggttatccgctttattatgatgctgttaatgaaaaaggccttggaatggcaggtcttaattttgtcggcaatgcggcatatgaagaagctttgccggaagatgaaacagaagtcagccaggtggcacagttcgagttcatcccatggatccttacacagtgtgctactgtagcagaggcgagagagaagctggcagcaatgagactgacaggcacagcattcagtgaacagctgccgacagcacagcttcactggatcattgcagacaaagactcctgtatcgttgttgagtctatgaaagatgggctgcatgtatatgataatccggtaggagtgcttaccaataatccaccattcccgagtcagatgtttgcactgaataattatgccggagtatccagaaaacagccggagagtacttttgcaggagtattacagcttgatgcatatagcagaggaatgggtggaatgggaatacctggagatctttccagccagtcaagatttgtgaaagttgcctttacaaaattaaattcgatctccggtgaagaagaggatgagagtgtaagccagttcttccatatcttaggatccgtagatcagcagcgtggatgctgtgaggtgacagaaggcaaatatgagatcacgatatacacgtcctgttgtaatacagcaaaaggtatttattattatacgacttatgataatcatcagatcacagcggttgacatgcatgcggaaaatctggattcagatcagctgatctgttatccgcttctgtccaagggcgaagtcagatggcagaataaataatacgaaaatgcacggagaaagcataacgcagaacaacaggaggacaatatcgagattgtatggaatgcagatgttaggttgataattgtgcaagcaccgcctgcacaatttgtgcaacaaaaaagaggagccagtccagactcctcaaaggtacgttatttcaaaaagttgctcttgtgttccagcgcgtgcagattatgatagtcctcataaataagtcaattttgcagataaaattagcaactcaggaaaaaatgatttgcttggagaaatcgaaacgataagctgagataatggtttctcttctttagtgagcctatgaaatgacgaaatgtggctcgccacatcaaacagccgataaaatgacaaaacaactcggccatgcagccaaaacactccggctatccgacaaaacagcccggctttttttcgtcaaatcaggtcggctttaacaaaaaggttgcctcacattattgcgtgaggcaaccttttcgttattcaatatggtcgttgatccaataccgaagctccgtttcgtcgtaaccgtcaaaacaggcagcggctggacagacatgggacaatagtggcggggagttgtgaaactttccaccactataatgttcagggtgtgaagtaaatgacgagcaatgagctgaaacatgaagccaagaagcaggaatggagcatgtctatacaggaatgcaggggcagcggtctctctgt

SEQ ID NO: 26 - DNA, 203990 bp, Colonithrix sana
  source 1..203990: mol_type = genomic DNA
tgaacagtgcagataagtataaagctgtgaaagcggagatcacggccatctaccacgaaaacagaggacgatacggctatcgccggatcacggcagaacttcgcaagcgtaaattctctgtgaaccacaagactgtccagcggcttatgaaagagttgggcttagtttgccgtgtcaggatgaagacgtatcgctcttataagggagaagtgggcaaaattgcgccaaatctgttgaatcgggacttccgcgccgaaaagccgaaccagaaatgggtcacggatgtgacggagtttagcctgtttggagaaaagctctatctgtccccgattctcgatctgcacagcagcgatctggtcagttacaccatatcggatcgtcctgtactcagcatggtaaccaccatgctggacgaggcgtttgcaaagatcccggccggaacaaacctgattctccattctgaccagggctggcagtaccagcacaaacagtatcagcggatgctccgggagaaaggtgttcgccagagcatgagccgcaagggaaactgtctggacaatgctgtgatagaaaatttctttggcttacttaagagtgagttgctgtatttgcaggaatttcaatccatggaacacttcaaactggaactcattgaatatctggactattacaacaatcggcgcatcaaggcaaagctaaagggcttgccgcctgctcttcacagacagcaagccctttcggctgcttgaacaatttttacttcagaatattgtctaactttttggggtcacttcatttggctgtgggtattttctgtttgaactccaaaagctttgcagaactcaaggagcctaatgccaaattcagtatgtcaccaactatgaggaaaacatcctttagagaaaggtcaaaattcaaatggttcggcagggaagataaacggtgtccttttgcgatgccgcttccgaaagattgcggcttcgccccttaacgaagactttaagttaaatctgttatactgctgcagtcccctcaaaaatacagacaggagaaaaaattgaccgtatgatgaaaaaaagatatttcgctattcccattcttgcagtcgcactgcattttttgctgtccaatctgttgtatttccttgtggaaagactcgttttggatgtttttcatatccccccgcagcaatttatgaaatactcatattggggcgagattttgatctacgctgttcttatcctcgtattcttcacgctctataaactgctttggaggaaagagataagcgaaccgcgcacagcgacaaatttcaaagatgtgctcggcagtctggtcgtgggatttggcatttgcgggatctccggtctttggatcatgctggcagaacagcttccctcgcttcaaaaaagcgttgaggcaatgaacgccggtgctgaaaatattgccggaggaaatgcatttggaacatttatgatcgcggtgattgctgcacctgttgtagaagaaattctattccgcggcattgtgcttcgctccatgcggaaatttacccccgcttgggccgcgattctaatatcatctgtactcttcggcgtttatcatctgaatatcgtgcaggctgtctacgctgccttcatgggcattgccgcgggaatcctttacgagaagaaaaggaacctgctgtttcccatcctcgtgcatttcgcaaacaacctcattactatgctgcagggctttgcgccatccgaggtgaatgaactgatcagcatttttattctgatcatgatcgctccggcagggtatgtcgtctgccgttcactccgacaggacaaaagagtagatagcgtgtaaggggtttatacgacgcataaagcatacagcggcacagagcaaactctctgtgccgctgttttttgctttcttcgtaatagaagcagcgcggaaaaagggaccggggcacagtaagcaacgccaaagtcgcggcagcccatcttatctgaccaggtatttccacaggaatctggtccatctccatggtcgccggccaaggaagcgggtacacacggccgaaatgaccggccccaagcccccggagatatccaatgaccgcaggacttgtgtatgaggaacacaacccctgtggtcaacatgtccaggacgactatccattatgactgcaaaaagcagaggccacgtcggcggatcaaaaccacatctttgcagatactcgatcacgcgctcccttgtctgctgttatggtagtcgcctatgcgctgtgcggttcgttgcatcttcacatatgccctcggaacaggtgttgcacacatattcgcgaagctttccgcagtagagcagtgtgtgcggcattctatcctcctgttttttctgcgaaacttatccaatctatgaaaaagacacttcttccgctcctcgcctcaggcgggacagcgcacagaccgcgtacatataggctgcaaggatcagaggcgccggcagtccgtaaagcagcggcgccgggatgatgcgccagaacagcttgagcacgccaatctccgcgccgtaagtaaagaagtagtttgcctccgggcagagcgtgaggcgtaacaggagattgatacagtgcgcgccaacggcaagcaggccaaaggtcttgaggatccgcgggatatcctttgggttggggcggtaaaagcccagcgttgcgaggctcagtccgcagacaataaggagcgcgtgcgtcacatagtagccaaagatcctcggcaggaacagcggaaaaccggcgaacagcggctccggaaagagcagtgccatcagcgcgccaagcggcgccacaaagaaagaaaagcccatgatcgatcggtttcttttccacacgcccagcgggatcagaaacagattgatgttgcaaagatgcagcggcagctcattgaaaatgttgaagccgttgggatagtaggcacggacatacgctgcgtccatggacagtgagagcttgtagccggcaaacagcgcgagattaaaaaagcaaacgccgatcagataccgggagcgccgtgcttccggttttccgcgcagcagtaagaatatgagcagcactgccgttgccgtaagcaaaagcagaagcaaatgcagcccgcgaaagggcgttatagaaaatccgttcatttcacatgccggaatgtctttccggtcttctcctcaagaaatcgtttgcattcctccaccgtcccgccggtaagagtacgcttgtccagaggctgcgcatagcgttttttcatcagaaggatgatgtagtcctgcgactcggccagtgcgtcgatcagctcatagcggaatgtggaggtggtgacctccgtaacaacggtataggactcctcgccgaacacaacatgatattcctttgtgcctgccagcgtgtttttgcaggcgatcatgccgttgagccgatcctgaaacagcagaacggacagcagcatcacctctaccagcagggaaatcaccgtgccagcatcaagcgtaaaaggctctccgtcgaatgggatcagcagcagagcgttgatgaaaaagacgctccagtcgaaaatggcccaaataatgtttctcttccgccgcagcaccctgcgcatcgcgcgggaggctatggtcatagatcgatttgtgatatcgctgtgaatttcaaaagtcattcatattctccatcgttgatcatttttgtttttgcagcctgtctggcacctcgcgaaagcgcccgtccagagcagaataaaactatgttatcataacaggaataaagtttatgtcaagtctttctattctccttgaaatcgtcacgcttactatgtacgcagcgctatcgcagcatcacgccagccttgcgttcaccagatggtaccatgtcatcccgttttcttcataggactgaaattcaccgatgacggtgatctccgtccccagctccgggtaatcgtccgggtaggtgagatccccctccagcacaaattccatcccctcagcgcagcaggcggctgcgtctgaaatgatgcaggcgtaggataccgggtcaggctgtaaaacgccgtccgtcacgagctgatagatggaaaattcccctcgcgccttgacggtcttgccgaggtaatgcgccgggtcattgtagagcatattgtagacctcggagtagaccatggtgctgctgagcaccgtcagatccacatccacgccgtcggcagatgtttgtgtctgttcgggttcctctggggtctgctgttcgtccggcgtttcctgttcattcggcgttggaatgctctcagccgatgcagacgcttcttcattggaagaagatgcgacatttcctgcgccttcttcgctgtctttcccgcaggcacagagggaaaccatcatgcaaacagccagcagcaggcagaaaagccgtttcatcccgcttcccctccccttgcacggccaagggccgagcaaatcaaaaatgccagaatatccaccgccacgatggtggagcccaccggcgtccccgcgagaatggagaccagaatccccagcgccgcgcagctcaccgacagtacggccgagcagaccgtcacagaccggaaattctggaaaacgcgcatggcggacagcgccggaaagatcaccagcgcggagatcagcagcgagccgaccagattcatcgccagcacgatcaccacggcaatgatgacggcgatcagcagattgtacaggtcagcctttgtgcccaccgccttggcaaaattctcatcaaaggtcacggcgaagatcttgttgtaatagagcagaaacaccgctacgaccaccacggacaatcccgcgcacagcaagacctcgcttttggacagtgtcagaatggaggtggagccaaacagtgtgctgcacacatcgccggagaggttggacgaggtggagaagaggttcatcagaagatatccgatggccagcgcccccacagagatcatggcgacggcggcgtcgcccttgatcttcgtgttctgcccggtgcgcaggagcagcacggcgcagaccactgtgacgcccagcgtcaggggcatatcgtccgtcagtcccagcacggcggcgatcgccatcgcgccgaaggccacatgggaaagcccgtcgccgatgaaggaaaaccgtttcagcaccagcgtcacgcccaaaagcgacgagcacagcgcgatcagcacaccgacaataagcgcatagcgcacaaagggataggtccagtagaacgcgagtttttcaaaaatcaccgtcatttcgccccaccacccttctgccatgcctgtgaaaactcgttcaggtaggccgccttcgtaccgaagaacaccgagtccccgatgtgcaggatgtggcttgcatattgcagcgccgcgttcaggtcatgggagatcatcacaacggtgatgccatcctcacggttgagtttttcgatgagtatatacatttccgccgtcaccttgggatcaaggccggagaccggctcatccagaagcagcattttttgtgtggcacacagggcgcgggcaagcagcacccgctgctgttggccgccggagagcatccggtagcagcgcttggcaagggacgcgacctgcattttctccatggcgtccaccgcaagctgtttttcttctctcttgtagaaagggcggctgccgcagcgtccctgacatccggagagaacgatctctctcacggatgccgggaagtccttttgtacctgcgtttgctgcggcagatagccgatctcatttttcctcagcccgtcgcctgtcaaaatgctgccgctgatgggcgtctgcaaaccgaggatcgttttcataagggtactcttgccggaaccgttctcccctacaatgcagagatagtcgcccgcaaagacctcaaaatcaaggtcttgcagaacaggtctcccatcgtagccgacgcagagcttttgacaagtgagctgagccatcatcctgcctccttaacccagtgcctctttcagcacggagaggttctgctccatgacagagaggtaggtagcaccgtttgccacatccttggaggtcatggactgcatggagtccatcgtcagcatcttctggttcttctcggcggtgttttccacgatggtttcggcaattttatggttcttgccctcgatggtcagcacacagggaagcttcagctcgtctaccttctttgcgaggaaggataccgtttcaaagctggcttcgctctcggcggagcagcccacaaaggcggcgtagtagctcagaccgtagtcgtccgccagatagcggaaggggaagcggtcgccaaacagaacggtcttgcgcgccgcaccgtccacggcagactggtacgcgccgtccagcgcggaaagcttttcgatataggcagaggcgttggcggtgtaggtatccttgttatcggggtcaagctcctgcaaggcatcggcaatcgcggcaaccagcgttttggcattcttcagggacagccagacgtgctcgtcagcttcctcctcgtggtcgtggccgtggccctccatgtgctcgcagagatcttcaccggtcatatcagctgggaagaaggtcggccacgacttttccggatcaacgatggcgtcaaagctctcgttgctcattctgatgtggaaatgctcgggcgcagccgattcgatcatgtggtcgttgaattcgatgtagatcggtgcgccggaggttctgtctaccgcttcaaagcgatacatggccgccttggtgccggtagaccagttctgaatgtaataaccgatatacttgtagtcagagccgacctttttgccgtcctcataggtgaacgcaatgtggtcgccttcaatgttaatattggtaatgtccgttttgtagccgttctgatagtaagtcttatactcgtctgcggtcatctcgccttcctctgccatcgctgcaaaggcatcgtccagcgttccgtccagcgcaaaggggtaggcagactgccaactgcccgcccagtcggacaggcttctgtcctgaacctcatgatcttcaaaggtggaaacctccttgctgtggtcgtgggcgtgttccgtttcctgcatcccctcaacggtctcttctgttttcacggaatcgcccagcacctccagcagatcaatgaccttcatatccttgttggtggcttccttcagcgcgtcatccacccatttatcggactcgccgcccacatagatgaagaggtcacagtcggaaatcttgacgatgtcatccgccgtgggctggtagctgtgcaggtcaacaccgttgtccagcagcatggtcagttcggtgctctcggccttgtcgccgagaatttccttgacccagtcgtattcggggaagatggtggtgacaacgctcagtttattggaatcgctctcgcccgtctctgcggcattctttttgccgcagccggcaagcaggccgaccaccatggtcagcacaagaaacaggggaatcattttcttcatagtataataaaacctccgaatttttgaaaaataggcgcaaaaatacaagggcagcggcaaaaccgcaagagcctatccgaaaacggatagacttcgcccttgtaaaagtcctgtttttaattcgaaagctttaccttgagcgcaacaagcgtcagtgtgtcggtcgtctctgcgcagggcaggatcgccttgcacatggtatatgtaaacgcagcagtgaccgctgcggcagcaccggcaagccccggagatttcagcagattctcgcagacaccgatctgatggcagatggcgcagtcctcgccggagcagtcatgatcggcttcgaccgcaatatagacggcagagaacagcatgacaacggccagcacggccgccagcaggcgcgtcataaagcaaggcttctttgtcatggtctgtcctcccttctgttcgttattttcccttgcagtccgagcagatcccatagaggatcgtgtcggctgtgtccagcgtgaattgctcgctctgcgccaggtgctttgcaaacagtgcggcgttgctgtcggccatgtgaaaggttttgccgcacttcacacagctcatgtgcagcgcgcccttgcagcccttggcgtcaagatactgataaaacgcttcgtgcgacccgcttttggcgctgcggcgcaccttttcttccgcttccagctgcgcaagatttcgatacacggcgctgaggctgatttgcttctctgccagtgcgtctgccatctggcgcgcagtcagcagctcgtccgggtgctcccccaaaaaagtaagcagggctcttcgctgttttgtattatagcctgacatcagcagccctccaatctgcaaactattcgcagatattatagcatcatttccccctttgtcaatatcatcccgcgacaccggcgtcttttcggcagttcaagatccgtcagcgtcaaagaaaacagcgtcacatcaaaggcttcgaaccggtgggcgcttacgcggtcaaagcagtctgcgtttcacggcatcatccaccggctccagttctttttccagcgtacaggacagatcccatagcagctgacgttcctcgtcatcctctgtggtcaagctgcctaattcatcccaccgcagaatgattcgatacagcgtcagagcctcctgctccgtgagtcttaattccataagaggcgcctccctctcagctgcttttcaacaggaaatcagtggtaaacgataccgtacatttcatcacgtcagccgcatctcattctcaaactgctccatcgcctcctgtcggctggggacttgcgcaagctcgcaggaaaacggctggccgaacagaggctgggacagtgtctccgcccaatgcgtcagcacctccggagtgagggggcgctcctcccggagaaagatcaccccgtaatagggcggtacagacggggaaagcagctgtgtcagcgggacgccgctccggacggaggcgttgcagaaatgcatctccggcgaaaaaagcggatagtacagcgccccgacgaaccagtcctgttcgccgtttctgagccgccttgcctgctccagaaagtgcggatgatccgggttatccggctccacaaactcaccgtcccgaatcgtctggcgaagtgcggggaggttatggaaatcaaagtggaaaaagggcgcctctcccgcctcgtcctcggtaagagaaaactccgccgcgtggaaaggtgcccagtccttgccgcagcggtaatagccccaccagtagttccagtcataaatatgcagatatttttttgctttgcagtccatagatgtactccattctaacaatgtcggcacaagagaaaatcacaggaaactctccacccgatatcaacaaaagtcttttctaagtccgtccttttttcaagaaaggtgcccaaaggcagtgcggtgatcttcttatctgctcaccggaatggatatctcgaaaacggcgccggtttctccgttgtaggcgcggatcgtccctttatgcaggtgaacgatctcattggtcagggcaaggccgatgccggattttccgctttttcccatgtagaagcggtcaaagatgtggggcaggtcttcctcggcaataccgtccccgtcgtcctgtatccgtatcgtcgcatgccgtttctccgtgcggcaggtcaggcacagctcgctgcgggcataccgcaatccattggtcaggatattcgtgaccgccctgcgcatctgcgtgtcatcgcatttgaccataacgggttcctcggggaaatccggcacgatggcgatgccgcctccggcggctgtcggctccacggcgcgtatgctgtcgtagagcagctcccgaacatccatctcggaaagggcaagccgctgccgccccatatcgatttttgagatgtccaggagctcgtccaccagctccgtcatgcggtcgctctccttcaagattacctccgccgcgctgcctgtgtccatgacgcccgcctgtatcccctccgcatagccctgtatcgccataagcggcgttttcagctcatgagatgcattctggaagaaggtctgctgccgctctgcctccttctcgatgtcccggccgaaccgaaaccccagcaggcacatgacagaggagatcgccagcagcaccgcaaagaacgcccagttcagcgtcacaatatagcgggtgatggggccgatgtctatgtacatgatgtaggcgtacggcttttcccaatcgtcctgctcctcctgcacggacatgaatatcaggtgatgtttgtccgttttgaaggtatagcattgattgagtgcaatatcccgcccggcgcagtattccagcagctttttctccagccggtaggtatcccgattccatgtgttgtgccggtagccatcctccagctccaaaaatacgatgctgggcgtaaagaagtattcctcctcccagttctcgtcatagtccggttcgtcataggtgtagggtatggctcgattctgatactctgcctcgctgatgagcgccttttttgcctcgtttacaaagtgagacgggatgatcacgtttaccgccagcacaaaaagggcagacagaagtaaagccgagccgaggatcagatacacgatccgcagcttgatgtttttcatacgcttcccgctcccttcagcttatagccaaagccccagatggtgcttacgctgacggtgctgcccgcttgcagcagcttttttcggatacggcgcagcgtttcgtcggtcacgcgggtctccacctccgagtcgaagccccacaccgcgctgagcagctcctcgcgggaatatgccttttccggctgcttcatcatatagctgagcagccgcagctcggtctgggtcagcgccaccggcacagttccgcaaaagatagcgttttccgtggcggaatagcggatatccccgtaatgcagctcgtcccccgccgccgccgtttttcctcggtccatctccacacggcgcagcagggccttgaccttcatcagtaatatcgttggacgaaacggtttggtaaggtagtcatcgctgccctgactgatacccataacgtaatccagttcgctgtctttggctgtgagcagaataatgggaatgtcagacagcgcgcgcagctcccggcacacggcaagcccgtccgtgccgggcatcataatgtccagtatcacaagctccgctggctcctgacgaaacgcctccagcagcgcatcaccgctttcaaaggagcgcacggtatatccgtcgcttgcgaggaagctatggagcagctcccggatgctcttttcatcgtccgccaaatagatggaatgtcccatgcgtcctccttgaaagcagcgccaaatgctgcgcgtgagcgcagcatcggcatgatgttgattttatactatcagaatatcgccttcccgtcaaagggggcagatgccgccctcgcagccggtgtttccccaaatggtatcgtacagcttgcacagctggttatcaagctctaccagacggttgtagtcggcgatcagcgcgtccttttccgcgtcggacaggaagctcaggctgcggataaaggctgcctcatcgtagttgtcgaagtcgtagtcgtccggcagatcaaagtacgcttcattcaccttgtcccacagatcggcgttcttctcgcagacgcggtcatactcctgctccagggtgtcgatctcatccagcaccttggggtcggccttttccagtgtcttctcgtaaagcggcatattgtcgcaggcgggcagctgagcgtacagtgcctccatctcagcgtcgaggccgttcagttccttgatgtctgccagaagggcttccttctccgcttcggtcagggcattggtgctgcggataaacgccgcctcatcaaagtttgtgaagtcgtagtcgtcgggcagggcgttgcagatttcatccagcttttcccacagcgctgcgtttctctggaagatggcgtcgctcttctcttccaccgcctcgatctgctcccagatggcgtcctcattctcggtggcaattttagtaacaggctccattggtgcggatgtggcggcaaaggcggaggttgccgtgccgatggccgttaccgtcaatgccagtgccagcataaagctccaaacagttttctttttcatggtatgttacgctccttttttgaagtatttgtggttgggtatcaaccttgtctgtagcataccagaagctgcattgaaattcccccgcgaaagtgcggggaaagtgtcacaaattcgtcacagcgcctgtgttatacaatgaacacccaccccggcagccgaccgatgggggggatcgtttcaatcaattgtggtgctgaatttgcccgcccccgcaagcacaaaaacatgagtttctgctccctgcttgttctttctctggcttaatctccgatagagtgggctgttctggtgggttcatattgaacccctcctcggtccagcaaatggacattatccttcctgggcgccaagataccgaaaatagatacaacaaataaaattaagtcaatctcgcgttgccatccagagcgcaaattcatagccgtcagtgccctcatgcggtatggcataaagcacagaatgacaactactgccgaaagcgaaataattaatattctgctcacatattgcatcaaacctgtcatgtcgcgtgtcgcccataatcccatggtaggggatggctgagagatatttcaaaattaatacaggcgtagttttcatcaccagcaattctctacatcaaaaagggaaatatccgaattgaagccgcctgacaaggaaaaacctcttttgtctgttacggcaaaagaggtttttcgtaaagagagggactgaaaatgctgattgacagttcgatcgcacaggcatatatcgagagcagctgcgtcgacgcttttcgtgcttcatggctctttgaacacacctcggtttcgtcagatcttggcaggaatgcatttactccgccgcctgaggatcttgctctccgagagactgtgcgcaagctcgaacgccgtatctgtgaagcggctgcgcactttgtccccgtcaaccgcccgatttgggacgcgcttttccccgattgggaggcggtacagccgacacttgatttgatcgtcggttatcccgagccttacgacgccgttgcggcacactcgcccgacgggcaggcacatctcatctttgacctcatccgttggtgcaattatgcggagctcgaccagctcgacagcatcattcggaatctgctgacgcatgagattacgcatctcttgattggacaccgctatccggcggcagatgccgcattggaaagtacagactatttgacaagattggatgcttacacatttcatgagggattcgcccatcttctctcctatcaggcgacagaaatcgactgtgtggactggcatacaccgcagcttaccgaggtcgcagcagcaagccgtgccaaactgcgcctcgcgcttacggagacggacccagacaggcaaaagcagtttctcgaagaggcggtctgcggatcgtactatgaaaagtttgcctgtatgtgcgctatgctgtatctggcagaccgatgggaaacgcagggaatcgacggcctgcaaagcgcatttgcggactatcacggctttgctcaaagggccttgagcattcgaatttgattgtaaaagaggaagagacgcgaatgcgtctcttcctcttttacaccttctctcgcttctgccgccagaggttgatcgccagcatgaccgcggcgtagatcagcgcggcggcgaggataatgagcgagaagtcgcgctgcatctggtagctcgtcgtcgtgaaacccttgacgagtagatgaccgccaagatagctcgcgggaatcagcgcgagatagccgagcgctttgcccgttttcttcctgcggcagacgaaaaatgcaatacccagcgtaataaggagtgctaacgatagcaaaacgtaatagcccaacgccagccgcggcagagaaatgatgccgccgttcatgttgccgcagagcagcacatcgtcctgcccgttgttcggcgaatagcagactgccgcgcagttcgcggcgtcgagcgtgaagagcgtgcgcgcggactccgccttggcgagcacgccttgcagtgcgtccgcctcgcgctgtgtgcgatcatttgcgctgtgtgtgttcggggcgcccccggttttgtcgaatgcgccgcgccatgtgtcgagcggcgtgcgccatgcggtgatgaagtagatggttttgccgctgttggggtcctgcgtgttcgtgacctctgcgccggagaccggcacgagcaggctgacggagatgctctccgcgccgctgagatcagaaagcccatccgctgccgagccgtcatccgcgagcgcgctgggcgagcgcgagatcgcccactctgtctcgctgtacggcaaatactgcggcgcggtgagatacgcgaatcccgccgtcgccagcgtcagcgcaagcgtgacggccagcagcacggcggtcagcttcttgcgtcgaagctgccgtttcaagtcacgaagcggctgcgcgctgacgggcgcgggcttcacgtccgccttcagcgcgtcgagctcggcgcggcaggccgcgcactgcgctaaatgcccgtccacaaattccttcgtctcctcgcgcagcatatcctcctcgtagagcggcagaaggtcctgcacgatgctgcaagttttgtccatttcagtcgtcctccaatccctcgcggatcatgcgcttggcgcggtgatacgtcacgcatgcccagttttccgtcttgccgaagagcgcgccgatgtcgcggaagctcttctcaccgtacacgcgccacatgaagacctccttgtacggctctctgagcgcgtgcagcaattcctggatgcgcgcggcctcgctgtgatcttctaactcctcctcgtggctctcctcggcgatccggcagccttcgagcggggcaagccgcttctcacgccgcagctgcgaataatagagattctttgcgatctggcacagccagacgcgcacgctgcactcgccccgaaagcggtcgagggcgtccatcgcgcggaaaaacgtctcgctcgtcagctcctcggcgacgctctcgctcccggacagcgaaagcagataccggtacacgtcgtcgaagtacacggcgtacacctcttcaaaattcgtcagcgccctcaccccctttctgtctataggacggcggaaaaccggttttcttacaaaaaaatccgtcccgcgggacggattttttctttcacgttttgacgacctttttcttgccgcacttcgggcacgtgagctcgaccttgccgatgtttttcggcacgcggcagtacgcgccgcaggagcagcggacgtatttgtgcgccttgtcggcgcggcgggccttcgcgccgcggatggcgttcgccttcggcgtccaccaggtcagaaacttcgcattctcggcctgacggcgcgcgagattgcgcgaaaaaatgcggatgagcacaatgaacatcagcaccatcgacacaaagtacagcgcttgggaaacgccctgcacgcggatgatcgagctcagaatgctcacgatcagctcaaggatcacgagcgcccagttcagcgcatccacgccgttgcggccatacataaagcggtaaagggcatcacggaatttgttcacaaaaagcactcctaaaatcttgatgctgccattctacacgcttttttcgcgcccgtaaacccatatcacagaaagtttacacttcccgctttggcacaagcggaaatgtgcccaaaaccacctgcccgccagtcggcctttggggggatagggggctacgcccccaaaccgcccccgttatccgccccgggggggcaaggggggctctgccccccaaaacgcctcgcagagtttcgccgctccgcggcgaaataaattcaaatcattttccgccgcgacctgcgcgtggcggaaaatacctctcaggccgcaagtgtggaatttgcccgcctgcggcgggcaaattatgcgcgcagcggcctgcaaaccctaaaaagaaagccccgctttgcggggctttctttttaagtgatttactttaccccgttgacgtagcgatacaggaacgtcacggcctcgccgcgcgtgcaggaggcgtagggggagaaggtggtcgtgctggtgccctgggtaatacccttgccgacagcccacaggatggcgttatagtagctcgcctcgttcacggagctgacatccttgaacgggttggagtagtagccgctgggcttgcccgcgtagcggtacaggaacgtcacgatctgagagcgcgtgcactcctgatacggggagaaggtcgtcgcgttggtaccggcggtgatgcccttctggctggcccacaggatggccttgtaatagctggcgtctctgacggagttcacatcggtgaacgggttgcgggtgctggtcggctccggagaaccggcagcgcgccacaggaaggtcacgatctcggcacggttgcagttcttgtacggggagaaggtcgtgctggacgtgccgttggtgatcttgttgttcaccgcccacttgaccggctcatagaagaagtcgctcgccttgacatcgatgaagttcatcgtctgggcgatggtgatagccatcgtaccggaggcctcttcgttcttggtgccgtaaacggtgaaggggatgtagacggtcttgccggcctcggcccatctggtggtgtggtaggcgacgtccgcaaggtcatactgcgtgcgggagggctcatagtagaacttatcggtgctgtcggccagcttgccggtggagtagctgctgtaagagcggtacaggccgccgtaagcgtaggaggagacgttcttgccgctcacgtcgaacttgacatagtcgagctcagccttgcggtaagaggtcctggcgtcctgcaggaagttgacaaagtcgcgcgcggtcagctggacggtatcgtcgatgccgacggtgtaggtgatgtcttccttgacgacggagatcacgacgttgccgctgtaatccacgtccttgcccttggaagcgccgtccttgtagagcttaccgtaagcggtgaaggaaatggtgatggtgtccttggccttggcgacggactcgaaagtcaccttgtcgagatcttcgaccttgtcgtttctgtcgatcttgctcttgccctcgtagagaacgccctctctggtggagttgggcagggagaacttgacgtagctgagctcaagggtgtcctttctggaattgtagacaccggcatcgtcagcgatgtcctcgaggaagctctcgaagtccttctggttgaaggtcacactcttgcccgcgacaacattgtagttgatgtcataggacttctgggaaacggtgatcgtaccggtggaagcaacacccttgctgtcaacgccgacaacatagagggtcacggtcttgctgctgttgaacttggaagcgggaacggtaacggtcttgttctccttgacgggatactcaaagccgtcgaccttgctgccgttgaagtagccctcgtaggtgggcttgctgtagctgtaatacagataggtgtagtcatcgttggtgaaggagacttccttgttcgcagaagtaccggttacggtgtccttgatggtctcatcgccgacaacggggatgtagagcgcaacagcgatcgtgccgctctcgccggtgagggtcacatcaagattcaactcagcagtgccgatgtagcccgcatccgtgtcgaaatacagataatcaacgttggtcaggtctttggtagtgctggtgatcttgttagcggacttaacttcatcctcatacagagtaacatgagaggggaatccaccagtggcaaccttaatggtattgatcttgctggtagataccgtagaaccagtggacttcttgattgcctgagcgacaatatccttgagggagctatcggacaggtaatcgctgctgccattggtaatcttatcaagagtcgcatcggcagcgctgacggagacatcaccgctgacagtatagactttgttcttgaaagtaacctttgcggtaacagtggtagaaccagacttgttgttggccttcagcataccgattttctcattcttggtgagagtagtaaaatcggcaacggaagtgttggaggaagtccacttgacagaatagtcattagcaccggtagtggcaccagtggtcttaacggagaaaggcttcacttcacccggggccatgctggtagagaagttgtccttgacaacatcataggaatcagggttaaccgtaatagcgtcggtagtcttctgcgcaacatccgtggagagaccctcagaaaccttgcaggtgacagtatagctgccagtgttcttcggaacaaacgtcagcgtcttgccattggcggtaaactctgaagtctggtcgctgaccgtccacttatacgttgcggtgttggcgttaataccgccggtgtaggtagcggttacggttacggtctgtcccttacgaacaccatttgcagttgcgtagtcatcaagtgcaagggtgacactgggattaacgctctgcggtgtaacagtgagagcaacgctcaaagtttcgtcgctgttcttgacaaaccaactgccagaagtatcctttacaatcttcgcgccagaataaccggaaacagttccgagcctcacattttcagcggagaaatcagggtcgcttgcaaacttatcaatagtgaccttcatgtcattgctgatggtataatttctaccctgataagtcacggtagcacccttgacagccgttgcaaacgcatcctgcttagaaacaacagggagagaagcagtcttcgaaacctggattgtagttgtagaaccagaggtcttttcgtagctaacggtaaattcgcaggtagctttaatcgtatcgccgcttgcggttgcagtctttgccgtagctgtaaattcgcgtgcattcgttgttttacccgcagtataagcactgccgacagaccagctaaatgcagttacagttccggtataggacttttcgctggcatcgccatcagtaacggtgatggtgctcgggatgttggcaacgaaagtgaccacatcgtcaaccacggcgctggacttgcttcccttgacagaaacagagaaaccagcctcagaggcctcggagagtgtatcacccgtagcctgtgccggaacgatgaccagacttaaaatcatggtcaacgccagcagcgatgagagaaatttcttcataattttcttcatcctttctcatttttgtgatctggccccgcgcgcacagagccgttctcatacatcggcattttaccatgccgcggggaataagggaacaggaaaatgcaaaattcataaattcttcatcttcctgtccgccgcctcccccttgtgtcacttattagacgcaaaaagcgtcgattttgtttcacaaaatctcaaaattttcaaaattttttatgccgcgaaaaaccgcacgtacacatatactcccgccgcgatctgcgtaagtaagatcgccggaatgccgaatttgaagtaccagtgccgcgttttgtgatgaaagaccctcattgcgaaaagagcacccgcgctgccgagcagcagcgcgagtgcaaataaggtcttttcgggcacgcgccgcgcgcccgatatcttggcgcggcgcttgtctgcgccgtagacgcagaaggtaattagattgatcgcggcgagatagatgacaaaaactctcacttttcgagcttgctgagctccacggccgccgccgcgccgaggcgcgcgttgttaaagacgagctggatgttggaatccaggctgtcgccgccggtcaggtccttgatcttggcaagcaggtacggcgtcgtggccttgccgtgaatgccgtccttcttcgcgtcctccacggcctcggcaatcgccttgtcgatgacttccttgtccatggagtactcctcggggatggggttcgtgaccagcagaccgccgcgcagacccagctcgcgcttgacgtggaacgccttggccagctgctcgggcgtgtcgagctcgtagtcgacgccaaagcccgacttgcgcgtgtagaacgcgggcagctcgctcgtgccgtagccgatgacggtcacgccgtgggtctcgaggtattcgagcgtgaggccgaggtcgagaatggacttcgcgcccgcgcagatgaccatgacggaggtgttggccagctcttcgaggtcagcggagatgtcgaacgtctcctgcgcgccgcggtgcacgccgccgatgccgccggtggcgaagacgcggatgcccgccatgtcggcgatcatcatcgtggtggtgacggtgcacgcgccgtccttgccctgcgcgacgagcacgggcaggtcgcggcgggaagccttcgggatgcccgcgccggtgcggccgaggtagtcgatctcatccttggaaaggcctgccttcaagcggccgccgatgatggcgatggtcgcgggcacggcgccggcctcgcggatgatgctctcgaccttgagggcggtctcaacgttctgcgggtagggcatgccgtgggaaatgatggtggattcgagcgccacgacgggcttgccggcggcaagggcctcggcaacctcgggggcgatatccagatacttgttcatagttaaaaatcctcctgtaaagtaataggtgaaagtttcacgtttaccttttgaggtaagattgtatcataacatacaacttgtcaaaagtcaatacaaagcggggcttgaatttgcacgggaagtggcatataatacctctattatcccgtgaaaacccacaaaaggaaggaaaattattatggaacgagtgagaattgccgcgctcttcgccgacaaagagcaatacggcggcgcaagcgtcaccgtatgcggctgggcgaagaccatccgcgatatgaagaccttcggattcatcgagctgaacgacggctcgtgcttccgcaatttgcaggtcgtgatggatgcgaattctctttctaattataaggagatcgccgcgcagaacgtgggcgccgccctcatcgtgcacggcaccgtcgtgctgacgcccgaggccaagcagccgctcgaggtcaaggcgacagagatcgaggtcgagggtgcgtcctcccccgactatcccttacagaaaaagcgccacagcgtcgaatatctgcgcaccatccagcatcttcgtccgcgcacgaacctcttctcggcggcgttccgcgtgagaagcgcggcggcctacgccgtgcacgagttcttccagagccgcggcttcgtctatgtcaacacccccatcatcaccggctccgactgcgagggcgcgggcgagatgttccaggtcacgacgctggaccttgaaaacccgccccgtaccgaggacggccagatcgattacagcaaggactttttcggcaagaagacgagcctgaccgtttccggccagctcaacgccgagaacttcgctatggcgttcggtgatgtttacaccttcggccccacgttccgcgccgagaattccaacaccgcgcgccacgccgccgagttctggatgatcgagccggagatggcgttctgcgacctcaacggcgacatggaagtggcggaagcgatgatcaagcacatcatccgccgcgtgatggagcgctgcccggacgatctcgcgtttttcaacagctttgtcgacaagggccttcttgagcgtctccagcacgttgccgagtctgactttggccgcgtgacgtacaccgaggccgtcaagctcttaaaggagagcggccagaagttcgactaccccgtcgagtggggcatcgacctccagaccgagcatgagcgttacctcaccgagcagatcttcaagcgccccgtgttcgtcacggactatccgcaggagatcaaggcgttctatatgcgcctcaacgacgacggcaagaccgtcgccgcggcggactgcctcgttccgggcatcggtgagatcatcggcggcagccagcgcgaggagcgcatcgagctgctcgaaaagcgcatccgcgagctcggcatgaatcccgaggactactggtggtactgcgacctgcgccgctacggctcctgccgtcacgcgggcttcggcctcggcttcgagcgcatggtgatgtatttaacgggcatcggcaacatccgcgacgtggagctgcatccccgcaccgtgggcaacgcagacttctaattcttcaaaaaacaagggacacggaaaccgtgtcccttgttttttgagaattacactccgcttcgtgccttgccgcccaaagggcggcttcgacacacgcggagcgagaagagttttttggcacgcgcatgtcgcgcaaaaaaacgattcgaaagcattttgcgtctgcggatgcgaaaagctgtgacgctttaattatttgtggtaaatagttacaaatgggaacaaaagcgcgaaaggcgtagtcaaaagaaatagagtctgctataatagccccgcagttttgagagaggagattttgacatgaaacacttttttgcactgctgctcagcgtgctgatggtgctgtcgctactgactgcctgcggcgacaagacgacgccgtccgacggcgacgatcagaccgtcacggatgagaatggcggcgacaccgacaacaatactgacgatacaactgacccctacgacgccgtgcgcaactactggtccgaggaccagctcacgcaggcctggggaccggatcaggtggtggagcacctctttttccacccgatcatcgcctatccgcagtgggccttccacgactgcaatgccagtcaggatcagcgctacggcctcgacgactggatggtcacggcggacgagtacaagaagatcttgcagtccgtgtacgacaagggctacatcttagtcgcgatggaggacgtgtggagcgaggtgacggacgagaccggcacgcacatggtgcgaaacaccctgatgctgccagagggcaaaaagccgctcgtcatcagctttgacgacgtgaactattacccgtatatgctcgacgagggcttcacgagcaagctcgtcgtcggcgaggacggcgagatctgggcgcagtgcaccgatccgtacacaaatgagacgtttttgaccaaggagctcgacgcgacgcccattctcgaccagtttgtctacgagcatcccgacttttcgctgaacggcgcgaaggccatcttctcgctgacgggctatcagggtattttaggctatcgcacgcaggatgaccgcgacatcgcagcagattcgcccgaccgccccgcgttcgatgcctaccgcgcgagcgagatcgaagcggtcaagcccgtcatagcgcgcttgaaggagaccggctggacgttcggcagccacacctggggccacatccgcctcgacacgaagccgctccagaccgtcatcaacgacaccgagcgctgggcggacgaggtcggctcgctcgtcggtccgacgcaaattctgttctacccccacggcggccgtcccgacggcgacgactggcaccagaccggcgagcgcttcaagtacctgcaaagccagggcttccgcatcttcgcgagcgtcggcacgagttcgttcagctatgtgaagcccgacatctctgccgtcatctgcgaccgtctgcatccggacggcaccacgctgcgccactcgcgcagccgctatctgcaattctataacgccgaggacatcatggatacgcaagtccgtcctgatctcggcgtagactggtgaggaggcgttattatggcaacgttagaagaactcaaggcgaaggccgtcgccatgctggacatggcgtatgtgccgtattcccactttcccgtgggcgcggcgctcgaatgtgaggacggcgcggtcttcaccggctgcaacatcgaaaattcgagctacggcctgacgaactgcgccgagcgcaccgcggcgttcaaggccgtgagcgaggggcaccggcgcttcaagcgcatcgtcatcgctgggcgcagcgacgactactgctacccctgcggtgcgtgccgtcaggtgctctacgagttcggccccgacatggaggtcgtgtgcctgaacaaggacaacgaggaaaagcacctgcacatcaaggagctgctcccctacggcttcgaccagacgtggcttgcaatcgatgagaaataacgaaaaaagagagcggcactgcctctctctttttttgcgctttagttgctgccggaggaggcatcgatcgtcaacgtgccgctgaccgtcgaaatttccagctcgctcaccgcgccgccgtcgagcgcgggcacggtgtagtacgcttcgtggtcgccgcaggcgatgagcgttccttcacgctcggtgagcgcggagcggaacgcgccgcttttcgtttcatagtcgagagtaaacccgtcctgcgtgggaagggtcagatagatgctgccgctctccgtttcggcatcaaggcgcagcgcacgctcggtagccaaaatcaggtcaccgctgacgctttcgaagtccagcgcgccgagcgcgccggcgatatccaccttgccgctcgcggtttcgatctcggcattttccgcttcgcccgcaagctcgatcgcgccggagacggtcgagagctcgactttcccccatgtgccatccaccacgcccacgctgccgttcaccgtctcgatatcgaccgtggggcaggttgcacccatcacgcgcgcgtcgccaccgacggtcgaaagcttgatcctgccggaaacgtccgcgcccacgatggtgtaggcgtccgttgtttcgacttttatctcctcaaagtgaccggcgctgaccagttccctcggaagtcccacgtcgaggtgcttttccccgtcgtagctgccgcggtaagcgtcgccgaggaagtggatgcgcagcgtgtcgccgtcgagcgcgcagaccatcttctcgctctcggcgagcggcgcggtggattcctccttcacgctgatctgcgcgctctgctcggcggtatagatgttcacgctgccgctgcgccacgagatgtcgatcttgcggatgtcttcgctctcgccgatgctgagcaccgcgcccgggtggagctcttcgctcccctccgcctgcgtggagaaggtgtaggtcgcgctactggcgtcccagagggcgtcgacggcgaaaatgccgtcgctttgcggcagttctgcgcggaatgtgccgttatcctgccgctgggcggtcacggtctcggacggcacgtcggtggtgccccaggcgtcggacggccagcagcggagactgacggaatcgggcgaattatcgccgaaatcgagcgttacggtgtagaaataggcggctgaaactgcaaagggcatttccagtacaggcgtgatgtcacgggaggtttcgtccagcgggtgcgcgccgcaggcaatgacggtcatgctctgtaggccctgggtgtaggtccagtcgtagctgctgcttttgagggtgacgctgcaagcgtttgcacttgtcaccgtcagtgttggcggggtttggcgcgcggcctcgtctgcgcttttttcgccgcaggcggcgagggaaagggccagcacgagcgggagcaggagggaaaggagcttcttcatcggtcggtcctcgtttctttcggatacttctatagacgcatgataggcgaaaaagttcccgcgcacaacggcgatcgctgcacaaaacgcggcaatttgtggtatcgtgaattctaatattgggggcggtacaactttttgcgccgttgtgtgcaacgctgcttcatgatacggcgtatcatgaaaaggcaaatcatgtgtcagtgtccccccattttcaggggggtgtgaggtgccttttccaacattatcaaaatttgggggaaagagcatggagacgacaacaaattacaaacttccgcaatgggtcaaggcggatcagatcaagatggacgacttcaacgacgcgttcggtaagatcgacgcgcagatgaagaaaaacgccgacaaggccaacgcggcggcgagcgcggagagcgtgggcacgcagatcacggcggtgcaggaacaaatcgtggcggtggagcaggagatcaagctggtgtcgctcggtgaaccgcgcacgacgacggcggcgaacggcagcatcgtctacgacctgtcggcgctgaacatggcggactaccgcgcgtttctggtgtttgcgacggtggacgcggcgggcacgggcgtgagcgacaagggcagggtggaactgctgtgcgacagcaagagcatcggactgctggccgacgcgatgggcggccacgcggcgaccgtcgcgtggatctttcccgcgatgtacggtgtggcggcgggctaccacacgccgacgcagaaccgaaacgacagctttcatggcttgagtggtgcgattcagaatcttgatgctgactggaacaccatgcagagcatgacgtttcagtttaccggtctgaaaggttcaagctgtgtgctgtatggattgaaagcgtgaaaatgaacaaaaaaagaagacccccgagggggtcttctttttttgcactaatcagagattagacagtgggggcattggtaacagcgatgcggtagtaagcaaccgtcttgttgtcccaagcaacaaccttaacgagcatgtcgccagcgaggttggcatcagcagcaaccttggagctttcgacatcctgagtgttgtacacacccgcgatggtctggttctcgttggccttagcttccttgttgaggagcgtgaccagatcgccagcgctgacggtggcgttcttcagattgacagtaattgtaccggcgatgccagtagcaagatcgtcgttctcaaccttagcagactgatcctggttggtgaagaagtaggaatccttagcaaccagcttagcgtcggcataggcagcctgatttgcggtggtataagtgatatcaccggtaacaacgccggagtagctaatctcggcataagcgaccttggtgcccttgtcggcgtccatggtaacttccttgccgtccttgtcgaagtacttaacaccagacatcaggtcagtggaaccaacagtaccattggagttgtacttctccatgacagccgcggaaattttttcgtactccttaaggtcgaccttaatggtagcaaactgatgaccatagtactcgccgagttcttcgtcgttcacgagagccttgatgagaagatcgtaaacaacaagtgcatcgtgcgtgtcaccgaccttgctgtcgtcgtactggacgaagataaggctcttttcagccagctccttggcagtccactcttcatcaatcttgcccttggtaatggtgccttcgtacttggcaaccagagcgtcgtcaagatcgaaccaagtgttgttcaccttaacgcgcttgccatccgtggtaagctggtcgatggtataagcgttgtacttggcaatcgcggtccagacgtagtcggaatccatggtgaccttatacaggccaatcttatcaacaccgtggctggcagtgccctgaccctctgcatagtagaggtcgatggtggtgtcggtcagcttgccatccaccagctcataggccttgaaggtggcatagggcttgccgtcattccagtgggaggtgtagtccgtggtgtcatagatgaacacggtacgggtggtgacttcgtatgcgtagacatagatcatgtcaacgtagccattgacggtcgtatactgaacgtcatagcccttgaagctgggcagcttttcgtagccggtgtaggcggtgaaagtgcccttcggggattccttggtctgaagcaggatcttggtatccttgctgagctggagacgggtatctgcactgctgctggtagcattaacagtcaggtacttgtcaccgctattgtaggaggcaaaataagcatcgctgaacttggaatcatcgagcgtgtaagcgccgtccttatcgatgctgtaagcatagacggtgtagtaatagtctttgttcttggaagcagagacttcgaaatcagcaacatcatcaccctcaactttgttgatggtagcgtcagtcttgctgtcggcatcgaagaagtacagatcgccgtaagcggtgtcaacacccttgctgtgctccatgtacagggtatcgaggacagcatagttgctggcgagttcatcaacgccgatgacattgccataggtgtcaaagtagaagttgtaggtcttgcccagagtcatggtcttgggagcgaacgtagcagtgcagttgacagtagcgtcagccttatcgaggcccttgatcttctggatgtcgctgatgctcttgctgttgccggaaacgtcggtcagaacagcgttcttggactcagccttgaccatggactggatctcgccgttggcgatggtgaccagaaccatatcgtcagccttgaactcgtcctcagtctcgaacttggtgtcgagcttgccttcgtaaccgtggacatccttgtcaacgatagcgtaagcggaagtggtgtgacccttggagtcggtcttctcagcaacgaacttggtgacctcagcgaggtaggtgtcgatgttgacgagacgatcctcatagacgagggtcagacggccctgatcggcctgcttggaatcgtccttgttgtcagcaacagtgtaggtgccatcgctggtcttgctgttggtgtagacgtcgagcttggtgctcttcttcaggccggagtcagcatagatgtcgcagttcttggcggcctcggtgtaggtggcgagagcctcgacctcaacggtggtggacttgtcgccgacatcataggtccacttgatggtgggacggccaaactcatcggcctccttcgcggacttgagcttgaagctcttgtagccgagggtgtcgttctcggagaaggtcttgttgctgtccttcttgccgttgaagctcacggtctgataaccgaaagcggcggtgtaggtgaccatcggggcatcggcgatggcgcggaacagcagctcggcaacgagctcacgggtggcgggagcgttgaggtcaacacccttgacgttcttcagaacgccagcctgctgcgcggtctgcgcaacatgcagagcccagtcagcgccggtgaactcattgttctgatcgtagccgatggcacgcaggatcatcgcgaggacctcatagcccgtgaccttgccggagggctggaaggtgccgttgggataacccttgacgagcgcagcgttggcgcagtagccgatgtagccctgagcccaaccggcgccagccatgtcgctgaacttgttgtaggtggcgtacatggaagccttggcatccttgacgtcagcggtgtacacgcgatacacgatcgcggccacctcagcgcgggtgatgttgccctggggctggaaggaaccgtcctcataacccttgaacacacccatgccgttcaggacggcgacggcttcggaataatccgcagaaaccttatcggcatccttgaaagcggcgttggcgctgacggccagagacagagtcatgaccagagccagcaccattgcgagtaactttttcatagatgttactctcctttcataaatttccatccccttggagcgctccggcggcaaaaagcgggcattttgctgttcgcgggcgaaaatgaaagttgaccgaaaaagttgcaaaacatttcgattttcttgcatttttgactgttttgcaggaaaatgcgcgattttagttgctatcgcatccccttagcggcgcggaaaaagcccgccgcgcaagggcttgcggacgcggcgggtagcggtttggtagcgatttgccgaaaacgggggtttgacggggcgaaaaaaggctgattttgcaagggtttgcgggcgcgaaaggtcgggtagcggtttggtagcggtccgcagctaccacgattttagcactcttggcgcaagagtgctaaagttaaagatttgttcatcaaaagatgtatttttgttcacagggcgtgactatactcaaaattgttccgaggggaacgaaagaaacgtaaaccacgcgggctgcaagagcggtccgccagaatagatttggaggctttgtattatgtttgaacttagaccttttgaacgcagaaacaaccacgctgcggcttatgatccctgggatcagatggagcgcgcattcttcggcgacggctcatggggccgcggcctgagcgagtttaagaccgatattcaggacaagggcgacagctatctgctggaagctgatttgccgggctttaagaaagaggacatccacgtcgatgtggacggcgacacgatgaccattcgcgccgagcgccacagcgagcacgaggatcaggacaagaagggcaattacgtccgctgcgagcgcagctacggcagctaccagcgcgcgttcgacatcagcggcgtcgaggtcgcggacatctccgcgcagtacaatgacggcgtgctcaagctgaacatgccgaagaagagcgccgtggtgaacgcgaagcagatcgagattcagtaaagaacttcaaaagaggcggcgaaagccgccttttttgtttctaaggggactgcggttgtacggggtcgtgcaaaaaatattggcgaaagtccgctcaggtgagcgggctttttctttttttcggcgggccgcggccggaaaaggggaatctcgctccccgcgcggcggcgcggaacattatttcttgccgcctgaccgctgcgcgggtctaaaatcacaaaaagcggcttaggccgcttttttcatatctgtgcttatatattatatgtatgtggtggcggataatggcgaaagcgggggttttatgtcaagctgtaacagaagcggcggtttgttacaagtgtgttacagatggggcgaaagcgttgacttgaaatttggggtgtggtaaggtgacagtgcagaaagggtggggaacggtgcgttcccgacttagttacgggatcggcatgccacggtaagtaagccgagaatcgccgaaacttgctcctttctgacaaacgaaccatctttaaggggatgcgatatccaccgaatcgaacgatttcgcgctgattctgctgatttcctgcgattttcgattgttcttgcaacaatttgagaatttacggattttggcggcaaccacgcaggagagggaggtccggcgggtgttcggcctcaaggggatggaaatttatgaaaggagagtaacatctatgaaaaagttactcgcaatggtgctggctctggtcatgactctgtctctggctgtcagcgccagtgccttcaaggatgacgacaaagtcagcgctgattacgctgaggctgctgccgttctcgatggcatgggtgtcttcaagggctacgaagacggtgaattcaagcccctgaacaacatcacccgcgctgaggtggctacgatcatctatcgtatctacaccggcgacgtcgctaagaacgacaagtctggcctgtatgccacctacaacaagttcagcgacatgaccggtgccggttgggccgctggctacatcggctactgcgccaacgctgagctggtcaagggctatcccgacggtaccttcaagccctccggcaagatcaccggctacgaagtcctcgccatgatcctccgtgctgtcggttacgacaagaacggtgagttctccggcactgactgggctgtcaatgttgccaagtatgctgagcagctcggcatcctgaagaatgttgccaagaccaccaacctcggcgctcccgctacccgtgagctcgtcgccgagatgctgttccaggccatccagaaggatcaggtcacctatactccggccttcggttatcagaccgacaaggcgctgaaactcgaccagaagactctgggcgctaagaatttcaagctcgccatggatgacagcaccagcgatatctggggccgtcccacccacacttggacctactccaccggcgacaagaagactgagttcgtcgctactcccgacgcttccttcagcgaggccacttccgagtgcgatatctgcgaagctctcggcgagaagacttccgccaaggtcgttgaggtctatgtaaacggcgacaacaagagcactgaagccaagggccttgttgacacctacaaggccaccgctaccaaggatatggtcggcgagcagggccgcatcgctgagtactatgaggtcaagggcggctatcgtctggtcgttatcgacacctacctcgctcaggtcaccgacgttgtcaccgagaagctcgacagcaaggatcacgtcacccgtgacgactgcatgaagctcaaggtctggaacgacgctaagaacccgaacacccccgacaccagcatctatgttgagggcaacgactatgccgaggatgcttacattcttgtccacgtgaatgctgtcgacaagaccgacatcatcactgttgccaacggcaaggccgcttccttccccactgttgagatcgttggcgaggccaagagcttcaccggtgctcagaccaagacctactatcagtccaacaagcactgcgttgctggtgaggactatatggatgcttatcgcttctataaggatgtcaccaagctcggcactgttaagtacacctggttcctcgatcagttcggcaacctcatcggtaacgacgacatcgacaacaccagctatgccgtcctgaaggaaatctactggaccggtagcaaccgcaacggctacgccgaggctgtcctcgttgatatggacggcaaggaaagcactgttactgtcgatcagatcgacggtcttgctgaccagagcaaggataagccttatgagttcatcggtgctttcgattacaccaacaacgactctgagccccgtgtcaatgagtcctccgactccagcaagttccagagcaagtacgcctacatgtccacttgggacaactacaacaaggcttaccgcggcatggctctgttcatggtcgagcccaacgatgacggcactgtgaacctgcagggctatgacaagcaggtcaagaccgatagcaagacgacggatgttcgctttgtcgagtatgccggtaatgctaccatcaacgccaagtcctctatcctgagcgtttacgacaatgagaaagatgcaactgagcgcaccgccaagtacgctgtgagcagcaacgtcgagatcattgtccgtgagggcaacgctgacgacggttacacctacaacaccgaatacaccctcaagaccctgcccgaatacgctgacaagagcgttgaggcttacttcgtcaccgagggcaactacgtcaccaagatctacatcaagaacgccactgacgcttcttcgttcggcacctacgtcttcatgcccgaggccaacgacaagaacggcaacagcaactactggcgcgatgacgagactggcaagtactacgccaacgtctatgttgacggtaaggctcagaccgtcgaggtttcctttgaggtcggcaagctgctctccaaccaccagggtatgctcttccaggtcaagaagaccgagagcggcaaggtcgttagcgcttgggagacctctctcaccggtgcttacggcaagctgaacgatgccactaagatgattctcgttgacgaggctaacgacgtcgatgagtgggctgctaacactgtcagcgccgactacatcagctctcacgacaagctgctgaaggacgacaccatcctgatctccaacggcgcttccggcaagaccaacatcatcaatctcgacgagtccgagatcgttgtctgggacggctctgaagtcacgaagatcaccgaagagaccttcaacgagtacgctgtttgggctgtgagcaagaagggcgactatgagggcgctgctgcttacctgtacctcggcgtgaagccggtctccagcgctaaggctgctgctgacgctcttgcgggcaaggacctcggcgcgatcgaaggcactgacctgactctggctgagatgaaggaacaggctgttgcgaacgcttatgagctgctcgaaaaggccaacatctccggcgtgaagctttccgttaagtccactggctcttgggtcggcagcgatcttgtcaaggactttgtccccgatgccggtcactctgcgaaggtcttcttcacctttactgtgactgatgttgacggtaaggaagctaaggctgctgacgcttactccaccgtcaccagcaagtacagcaacaagagcctgaccgctgctgttgtcgatacccttgagggtctcaacaccatcacggataagatgactgttgctcaggtcaagcaggctgttaaggatgctattgctaccgaatactccctgactgacattaacgtgactctggacaccgatacgctcgctggccacagcgtgatcaatgtgaccgtcaaggccactcacgccactcttggcgaggtcaatgcctctgcccagattgctgttcaggcaaccacggtctaatcagtagattagattaaaactgtatagtttttcacccccgaggctttcgcctcgggggtgtttttttaccttattctcttattccgcgtcctccgtcgctttgtcgtagccgaggatgatatacagatacgtcgtgccgtaggtgttcagctgggcgtatgcgccgccggtgttgtaggaataccacgagacggaatcgtccgcccacgtgaggtagagcagcgagtccatggtggacttgtccgcggcgttggtgcccttgtcgttcgggcggacaaacacgctggggttggcgatgctgttgttgccggaaatgacgcgctgcaccagcacgagcaccggataaaacgggcttgcgagcgtggtgggcgcggcctgcccgacattgccgtcgccgacgtacgagccgaacgccacgcggcagttgtgaccggccgcgccgaggtttttggcgagcgccgacacggtctgcgcgtcggccttgccgctttgcagcgcctgcgccgcgtcggcgttggccttgagcgccaagtcgatgccgtcgaacgcgtcgttgaacggcttcattcggatcgggtcggtcccgacccattgcgggaggttgtagtttgcggtcttgtccatcgtcccgccccctttcagcgtccgcgcatgacggcgagcacgctcaccgcctcatcgatgctcgagaagcggtatttgcgctcgtctgcctcgcgctgcgccttttcgatcgggttttcgaatttcatccgcgctaagtgctcgcatttttcgatctgggttctgggtcgttcataggtgttgttgtgcatgtttttcctcctcattttgtgcagcccgcgcatttgcgcggaccgtttacagctataaagctgtaaagcggtttttgggacgaaccggtgcaacggaggaaaatttttccgccttgacaacgcgggaaagcggggtataatggagatagaaaagggcgctgttgtcatgacggttagccctcaaagctggttaaaacaatactatgttaaccgctcggtggccaccgggcggttaacacgcttttggggctatgtaggtcattaccacgaggacaatgacgagacacagaagaaaacgcagagcatttcctcttcccatccgcatcaccccctttcgcaagggagtggctaaccgccgtttacaacagcgcctacctttattttacggtttttgccgcattttgtcaatctttgccgcccgttgggcggttttttgcattttttagagggtttcgagcgtgaccagcgcgtcgagcagcggccacgcctgcgcgagctcctgccccgcctgccagaagccgatgccctgcaagcccttttccgccgcgagggcgatctttgcgcgcagcgagcgcgcgtcctcgaaccagacgacgtgctcgcgccgcattttgtcgaagtagtggtagcagggcgagcgcgcggtttcgtcaaactcaatttccgcccccaccagccgcgcacgcatgatcgcggcttgcgacgagagcgtctctgcccgcgtccgcccgctctcatacggcagcggccagtcgtaggcgtacagcggcgcgccgaggaagatgttctcccccgccgtgaccgagagcgcgtaatcgagcaccgcgcgcacctgcggcagcggcgcgatggcctgcggctcgccgtaggtgtagccccattcgtaggtcatcaggaagacggcgttcgcggcttttgatagcagcgcgtagtcgtgcgcctcgtacaataggccgcgctgctgcgcgctcgtcttcggcgcgagtgcggcgacaacgggctttccctcggcgttcagcgcctcgcgcagacggcagacgaacgcggcgtagtcctcgcgcagctccggcgggacgtactcgaagtcgacgtcgaggccgtagtatccctttttcgccatcgtctgcaaaatctcggcaaggagcgcgctctgcgcgcggtcgttttgcaggagcagcgcggcgttttcgctcgaaaaattcccctccggcatcagcgtcgagaggtgcatgagtgattttgcgccatagcgcgccgcacgttcgagcaggcgcgcgtcgtcgagcggcgcaaggactcctgcgggcgtgatgccgtaggtgaacggcgtcagatacgtcaggtacggcaggaccgagtcgagcagctcgccgccgatgtaggggtaggcgtaggcgttcacgccgagcgtaccgagcggcgcttcgtctgcgtagtcgatggcaagcacgtcgccctcgcgcagaagctcgcgtccgtggaggaaaaagttccgccgcaggagcgtcctgacgctcaaatcatagtcccgcgcgatggacgaaagcgtctcccccgcgcgcacggtgtgcagtgtcttcggcgtccgcacgacgagcgcctggccgatcacaagcggcgtactcagcgcaaggccgttgtccgccgcgacgaacgcgggcagggcatcgtgcatcgcggcgatggaagaaagcgtgtcgccgcgctttacaacatgaatgtgcatggtcgatcacctcgcaccattctatgccggatttttcgcgcttaccccagcgcgacgtccagtatcatcatcagaaggaagcccacgaggaaaccgcacgtcccccgccgtccgcccgcgcgcggaagaagctcccccgccacgacgtagagcatcgcccccgctgcaaagctcagaagccacggcatcagcgcgtgcactcccgccgccgcgagcacgacgagcgcgccgaacagcggctccactgcgccggagagcacgccggtccagaaggcgcgccgtttcgacttgcccgcctggtacaccggcagcgccaccgccgcgccctcgggaaagttctgcacgccgatgccaagcgccagcgcaaacgcgccggcaaggctctccccgtacgccgcgagcgcgaacgcgaggccgacggccatgccctcggggatgttgtgcagcgtgatggccgagaggagcaaaaaatcgctgtgcacctctcccccgccgcgccgtcgcacgagctcgtcgagcaggaagagcgtcagcgcgccgagcacaatgcccgccgcggcgggcagaaacggcggcaggcggccctctgcctccgtctgttcgatggcgggcagaatgaggctccacacgctcgccgccatcatcacgcccgcggcaaagcccagcagcgcgccctgcgcgcgctcgcacaccttgcgggcaaaaaagaacaccgtcgcggcgcccagcgccgtcatcagaaacgtgaaagacgtgccgagcagagccagcatcagtggtcgaagcatatccgttcatcgcctttacggtttgtcaggcggaaaagcgcctgtatgccagtataggcggcaggaatgaaaaacgtgaaaaagggcgcggagaatttctccgcgccctttaggctcatattgacttactgcatcagctgcgcgaccatgtcggtgtacgcgctgggatcttcgagcggcaggcccgcgatgaggtttgcctgatcgtagaggatcttggcatacagcgccgccttgtcgcggtccgttgccagcgcggcggccatcgccttgaccgccggatgatcgacattcagctcgaggatgcgctcggccttgatgggctcgggcatctggaagttcttgaagtacttctccatctcgaagctgaagccctcgcccgccgtcaggcagacgggatgggtcttcaagcggtgcgagaccttggcctccttgatcttgtcgccgagcgtctccttgacgaactgcatgagctcggcgctctcgctgtcgtccttgtgctcttcctcgtcaccgagctcgaggtcgccgtccacgatggagcggaacggcttttcgtcgtagttcatcagcgcctgcaaaacgaactcgtccgtctcgccggtcagatacagaacctcgtagtccttgtccttcaaaagctcggtctgcggcagcttgtccacggcggcgatgctctcgcccgcggcgtagtagatgcacttctggtcttccttcatgcgctcgacgtactccttgagcgtcgtgagcttcttctgcgtggaggaatagaacatcatcaggtccttgagcgaatccttgcggctctcgccgccgtcgctcacgatgccgtaaccgatctgacggccgaagttttcgtagaatttctcatagccctcgcggtcatccttgaggaacttttcaaggtcggcgcgcaccttcttttcaaggttctggccgatgaccttgagctggcggtcatgctgtaaaagctctcgggagatgttcaggctcagatccggcgaatcgaccacgccgcgcacaaagcgcagatagtcgggcagcaacgagtcgcacttgtccatgatgagaacgcccgcagagtagagctgcaatcccttttcatatccttccgtgtagaagttgaacgggcgcgaagacggcacgaacagcagtgccttataggtcacgctgccctcggccgagacggtaatcgtgcgcttgggcttgtcgaattcgtgcgtcagctcggagtagaacttgttgtactcttcgtccgtgacgtcgctcttcttgcgctgccagagcggcaccatggagttgacggtcttcatctcctcgacagtctcgtactcgggcttctccgggtcgctgccctctttgaccttctgctcaggcagcagcatgcggatggggtagcggatgtagtcggaatacttcttcacgagcgcgtgcagacggtaggactccaagtactcgctgtacttctcctcgtccgtgtcgggcttgatgtgcatgatgacgtcggtgccgacggcttccttgtcgcactcggtgatcgtgtagccgtccgcgccggaggactgccactcataggcctgctccgaaccgtacttcttcgtgcggacggtgatgctgtccgcgaccatgaacgcggagtagaagcccacgccgaactggccgatgatgtcgatatcggcgtccttcttgtccttttcctcggtctcctggcggaacttgtaggagccagacgacgcgatgacgccgaggttgttttcaagctcttcgcggctcatgccgatgccgttgtccgagaccgtcagcgtgcggttctccttgtcgaccgacaccgggatggcaaaatcgctgcggttcatgccgaccttgtcgtccgtcagcgcgacgtaacagagcttgtcgatagcgtcgctggcgttggaaataatctcgcgcaggaagatctccttgtgcgtgtaaatcgagttgatcatcagatcgagcaaacgcttcgattctgctttaaactgttttttagccataaaagcatccctctctgaattgtatttgagtttaagtatagcaggaaattcctgatatttgttactaaactcttaatttttagcactcgtcggcagcaagtgctaaagcgtgatgtttgccttttatatataaaaggtactatcggtttcgcaccggtgcgaagcgcttcgcggcacttgtgccgcgggggaggcagcgccgcaggcgctgcacattgatccctgcaccgtgcagggacgcgattaagggggatattctctttccacggaaagagaatatccccctttgacccccaagagaaagggattctcattgcgagcgagcagctcgaagaagtgcgatgcttgccgattgcactgcccatagcgcggcgttgccgcattagtgttgctatacgatttgacctactcctactatccgctgccgctctgccagtcttgtggcagtacggcctaatcaccgtctaccggggcacccatcaatgcggcgagcgcagcaatgccgcattcggcaagcagtctgccgccgtgctaccgtcactcgcgcctcacgatagtaaggcgcggttgcgagacgtaacgatttgcagaagattcatggcgaagccatgtacaccgcacccgattgcgcagcgcgtgcagctcttcaagctacaaactggcaatgttgggggtcgaggggagactcccctcgcctttctctgggggattcaaagggggtattctcttcggaaagagaataccccctttggtgccgcggcgcacacgccgctctcccctcccgcgcaagcgcgggaataaggagcagccctttcgggctgcaacattcccgcgcccgaggcgcgaaagttgtccaaattgtcaatatgggatacttatccccattttccccctttttctttggataatatgcggtattgacttctggcgttttagaggctaaaataagcccatcaaacatgagggatacatgaaaggatttaatgctatgttccgttttgcttatgcaaatcagaataacgccgccgcttctgccatgtgcgcagaggccgcttcctcctgcacctctcagtcctcccgcttcaactgcatcgctctgggcgccattattatggcgtccattattatttcccgcctgatcgccattattggcatttctctgctggtactggtacttctggtcgtcctgatgggcgttcccgggatgaaacgcgattgctgagcgagtaaaaaacgcgatacagcaaagcggttccgccgggaatggcggacccgcttttttgtataataaatctgttcattatttaatcaaaggagatttgaaacgatgaaaaagaagtttatgtgcatgctcatggctgcggccatgacgctctcgatggccgcctgcggctccaagagcgatgacaccaacaccgatgccaacaccgacggcaccgagaccggcgaggtccagacctttacggtcggcacctccggcccgctgactggtgacaacgcgatctacggcgtggccgtcaagcagggcgtggagctggccgtcaacgagatcaacgcgagcgacagcaagatcaagttcgagttcctctctcaggacgatgaggccgacggcgagaaggccgtcaacgcctacaacaacatgatggacaacggcatgcaggtcctcgtcggccccaccaccaccggcgcttccatcgcggttgccgatgtctgctacaatgaccgcacctttatgctgaccccgtccgcttcctccaccgacgtcaccgcaggcaaggacaatgtcttccaggtctgcttcaccgaccccaaccagggcgttggcgctgccgactacatggctgaaaacttcgctggtgccaaagtcgccgtcatctaccgtaacgacgacgcttactcccagggcatccgcgacaccttcgtgaaggaagccaccgataagggcgctttcgaggtcgtctatcagggcactttcaccaacgataccgcttccgacttctccgtccagctggccggtgcgcagaatgccggtgctgacctcgtcttcctccccatctactatcagcccgcttccatcatcttctcccaggctaaggccatgggctatgctcccaccttcttcggcgtggacggcatggatggcatcctgaccatgcccggcttcgacgcttcccttgctgagggtctgatgctcatgaccccgttctccgctaccgatgaagccaaccaggcgttcgttgacgcttacactgccgcttatggcaccgagcccaaccagttcgccgctgacgcttacgacggcgtgtacatcgtgaaggccgctctcgaggccgccggctgcaccgccgatatgagcaacgaagagatctgcgacgcgctcgtcagcgccatgacctccctcaagttcaccggtctcaccggtaccgacatgacctggaatgccgagggtcaggtctccaaggctccgaccgcttacgtcgtcaaggacggccagtacgtcaagggctaaattccgaaagcgcaaaaagctgcgacctttctcaaaggcgggctgctgggagcgaaagctcccggcggcctatgccctgtttctatggcggaaacgaaggcaggtgttttcccgcctctgcccttgtttctgccacagacgaaccataattccgaaagagaaaagagaggtgccatcctaatggaatttttatcctatctcatcagcggcatcagcctcggcagtgtgtacgccatcatcgccctcggctatacgatggtttacggcattgccaagatgctgaactttgcccacggcgacatcatcatgatcggcggctacgtatcgttctgcgcgatgttttatctggggcttcccaacatcgtggcggtgctgatggctgtcgtcgtctgcaccgtcctcggcatcgtcatcgagcggcttgcctataagcccctgcgctcggcgcccagcctcgcggtcctgatcaccgccatcggcgtaagctacttcctccagaactccgcgctgctcatctggaaggccgccgcacgctcctatccccccgtggtcacgggctctgtgaagatcttcggcggcaagctgaccgtttcctacatctcccttctcacgatctccgcctgcgtcgtcatcatgatcgcgctgacgcttttcgtcagcaagagcaagatgggcaaggccatgcgtgcctgctcggaggataaggcggcggcccagctcatgggcatcaacgtcaacgccaccatttccgcaacgttcgccatcggctcggcgctcgcggccatcgcgggcgtgctgctctgctcgttcaacacctccctcatgcccaccaccggctccatgcccggcatcaaggcattcaccgcggcggtgttcggcggcatcggctccattcccggcgcgttcctcggcggcctgctcctcggcatcatcgaggccatggccaaggcctatatctcgacgaaccttgccaactccatcgtctttgccgtgctgatcgtcgtgctgctcgtcaagcccgcaggacttctcggcaagtacgtgccggagaaagtgtgaggtggccggaatgacaaagaaaatgaaacagttcaactccctcaagaaaaccaccagggttgactttgcgacctatttcggcgtgatcgccgccttcgtcatcgtgacggtgctgcaaagcaacggctctctcaagcgctcggtcatcggtcttctcgtgccgatctgctgctatatgtccatggccgtttcgctgaacctcacggtcggcattctcggcgagctgagcctcggccacgcgggctttatgagcgtaggcgcgttctccggtatcgtcgtttcgcagagccttgcgggactcattccgaatggccccgtgcgccttgcgctctcgatgttcatcggcgcgcttctcgccgcgctcgtcggccttctcatcggcacgcccgtgctccgcttgcagggcgactatctcgccatcgtgacgctcgccttcggcgagatcatcaaggagcttatcaactgcctcatcatcggctgcgatgaaaagggcctgcacttcgtcttcaacctctccggcaacaaaacggtcgatgacctcggcctgagtgcgaacggcacggccatcatcaagggcgcgcagggtgcgaccggcaccgccaccatcgcaagcttcaccgctggctttatcctcgtgatgctcacgctcttcgtcgtgctgaacctgactcgttcgcgtgcgggccgcgcgatcatggccatccgcgacaaccgcatcgccgcgcaggccatcggcctgaacctgacgaagtacaagctcatggcgttcgtcacctccgccgccctcgcgggcgcggcaggcgcgctctacggcctgaactactcttcccttcaggcgacgaagttcaacttcaacctctccatcctcgtgctggtgttcgtggtgctcggcggccttggcaacatctggggctcgctcgtcgccgctgcggcgctgaccatcctgcccgaggcgctgcgtcagtttgccgacttccgtatgctcatctacgcgatcgtgctgatcttcgtcatgctcgcaaccaacaatccgcaggccaaggcgttcttccagaggcttctgcctcatcgccgtgccagtgctgaaaaggaggattgaccatgacacagaaagaaaaagccaagctcgttcccgtctcccgtgaaccggcgctgctcaccgagcgcgacgcggacaagtcccccgtgctcgagtgcatcgacctcggcatcacgttcggcggtctgaaagcggtcgacaacttcaatgtgaccatcggccgcaccgagatcaccggcctcatcggcccgaacggtgccggtaagacgacggtcttcaacctgctcaccaaggtctatcagcccacccacggcacgattctcttaaacggcaaagacatccatgacctcaacaccgcgcaggtcaaccgcgcgggcatcgcgcgcacattccagaatatccgcctgttcggcgagctgagcgtggaagaaaacatcaccgtcgcgatggacacgcagatgcactacacgatgcccgagggcattttccgcctgccccgcttctggaaggaagagcgcatcgttcacgagcgcgcgatggagcttctgtccatcttccacatggaagaccttgcaaacgccaaggcgaactccctgccttacggcgcacagcgccgcctggaaattctccgcgcgctggcaacgaacccgagcctgctccttcttgacgagccagccgccggtatgaacccgagcgagacggccgagctgatggaaaacatcagttccatccgcgataccttccagatcgcggtgctgctcatcgagcacgacatgaacctcgtcatgaacatctgcgagggcattgccgttttgaacttcggccatgtcatcgccaagggcacacccgaagacattcagaacaatcccgaggtcattgaagcctacctcggcaagcagaaggaggcctaacgatgggacagatcttacaggtgaacgatcttcacgtttactacggcagcatccacgccgtcaagggcgtttccttcgaggtcaacgagggtgagatcgtcacgctgattggcgcgaacggtgcgggcaagtcgaccgttctgaacacggtctccggccttttgcaccccaagcacggcagcgttgtttttgaaggcaaggacttaaagggcgtccccgcgcacaagatcgtcgagcacggtcttgcgcaggttccggaaggccgccacgtctttttgcagatgacggtcgaggataacctcgaaatgggcgcttacacccagccgaactccaccattgaagcgggcattgcggacgtctacgagcgcttcccgcgcctcaaagagcgccgcaagcagatcgccggtacgctctccggcggtgagcagcagatgctcgccatgggcagagcgctcatgtcgaagccgaagctcctgatgctcgatgaaccttccatgggcctcgctccgatcctcgttgagcagatctttgacatcatccgcgagctgcacgctgcgggcacgacgattttgctcgtcgagcagaacgcgcaggccgcgctctccgtcgccgaccgcgcgtacgtgcttgaaacgggccgcatcacgctctccggcaccggtaaggaacttatggcgagcgacgccgtccgcaaggcctacctcggcggttaacgcacagcttaaatacgaagagtcatccgaaaggatggctctttttttgtgcagttttgccgccgtgcaaaatttccgcccaacctactgcacatttgccaaagatatggtatactgacagaacatgacacaggatcggagggatcggattgttcaaaattctcattgcggaggatgaccgcgagctgcgccagctcttcgcccacgtgctcaccaaaaacggttacactgtcctcggcgtctccaacggcgaagaggcgcttgccgcgctcgagcagagctattacgatctcatcatctccgacattatgatgccgaaaatggacggctacgagctcgtgcgctcgatccgcgagagcggctcgtccatccccattatgatgatcaccgccaaggacgcctttgacgacatgcgcctcggcttcctctccggcagcgacgactatatggtcaagcccatcaacatcggggaaatggtgctgcgcgtgagcgcgctgctgcgccgcgcccagatggcgagcgagcgccgccaggtcatcggcggcacggtgatggagtgcgactcgctcagcgtcaccgtcgacggcgagagcatggtgctgccgcagaaggaattcatgctgctctacaagatggcgtcgttccccggccgcatcttcacgcgccagcagctcatggacgacatctggggctatgattccagcaccgacacccacaccgtcgacgtccacatcgcgcgcctgcgcgagcgcttccgcgacaatcccgacttcaagatcgtcacgatgcgcggcgtgggatataaggtggtgcgcacatgaaaaaacggcgcaataagtttctcgatatccgcgtgcagtttttcttcatctgcatggcgggctttatcggcgtggcgctgctcgccgcgctcgcggcctggggacttgagcatctcggcgtcaacgtgccgatgttcgtgtggctgctcatcttcacgctgctgctcggcagcgcgacggcggcgggcttttccatcgcgttcttcgcgcccatctcgcgcctgtcgcgcgcgatgaaggaggtcgcgggcggcaacttccgcgtgcatgtggagacgaagagcgtctttcgcgatatccgcgacagctttgacagcttcaacctcatggtcagcgagctgaacgcgaccgagaccttgcagaccgacttcatctcgaacgtctcgcacgagttcaaaacgcccatcagcgcgatcgagggctacgcctcacttttgcaggagcaccagcaatcccccgaggagcaggcggagtacatcgacaagattctcttcaatacgcgcaggctttccgccctcgcgggcaacattctgctgctctctaagctcgacagccagtccatccacccccagcgctcgcgcttccgcctcgacgaacaggtgaggcagtgcattctggcccttgagcgcaagtggacggaaaaggacgtcgacttcgacgtcgacctcgactccgtcgacttcacgggctatgaaggactcttacagcatgtgtggatgaacctcatcgacaacgccgtcaagttcggcccgcgcggcggcctgatccgcatgcgcctcatcgaggaagacggcagtgtgctcttcaccattgacaacgagggcaaaagcatcccagacgaggataagtcccgcatttttaacaaattctatcagggggacagctcgcacgaatccgagggcaacggcctcggccttgcgcttgtgcgaaagatcgtcgccatccacggcggcgaggtctgggtcgaggacccggtgaacggcggctgccgcttcgccgtgcgcctgccggtagagaagtgaccaccatttttcaacaaaaattgagattctcttcatcatttgttcgaaactctatgctatattaaaccttaacagctgcagaggcggcttttccccggcgcagtgtccctgcgtcgggcttttatcacgggataaggagaggtgacgatgggctttctgcgctgctgcgtttattacggaattttagccgtcgtgtcgtttttcatcgggcggctgctgccaaaatcctggttccacggcgacaaattcccctaccgctgcgcgagctgggaagcaaagctcttccgctttctgcgcgtgcacgagtggcaggacaaggtgcccgacatgagcaagatcgtccccaagctcatccccgccaaaaggctggacacggactttcgcgcgcagcttccgcgcatgatcgaagagacatgcgtcgccgagttcacgcactttgtgctcatcctgctcggcttttacgcactgcgcctctggcccggaacgggcggcgcggtcgtcaccgccatctatattctattcggcaacctgccgtttctcatcattcagcgctacaaccggccgcggctgcaaaagcttctcgccgcgcagcagcgccggagcagacgcaaccaagaagaacaacagtaaaggatcggatcttttcatgaaagtcttgattttaagctgcaacaccggcgaggggcacaactcctgcgccgcggcgctcgaggaggagtgccgcaaccagaacattccctgcgacaccgaagacgccctgcgcttcatctcgcccgaggtctcgcgctttatctccaactggcacgtgcgcatctaccgccacgcgccgggtcttttccgcgtgggctaccgtgcggcagaggatcatcccgcccagtttcacgagggctccgcgctctaccgctacctgacgcagggcgcggaaaagctctgcggcttcatcgccggcagcgggtacgacacggtcatctgcacccacacgttcgcggcgctgatggtcagcgaggtcgtgaagacgcatctgccgaacctcaagacctgcttcatcgccacggactacacctgttcgcccagcgtgaaggacagctcgctcgaccgctactttatccctgcctcatcgctctcgggcgattttctcggcggcggcgtgacgagcgaacgcctgcgcgcctgcggtatccccgtgcgccagatgttccgctccagcgtacgcaaagaggacgccaagcgcgccttcggcattcccgctgaccacaaacatctcgtgatgatgtgcggcagcatgggctgcggccccatcatgagcatcgcgcgccgcatcgggcgcgacctgccggacgatcaggaccttaccatcgtctgcggcacgaacaagcagctctaccgccggctccagcgccgcttctatgatgcgaaaaacgtccacgtccgttcgtatgtgaaggacatggcgcttttgatggactccgccgacctctacctcacaaagcccggcggcatcagcgtgaccgaggcggcctcgatgcgcctgccgatggtgttcatcgacgcggtcgcgggctgtgaggagtacaacaaggatttcttcctgcgcacgggcggcgcggtcacggggcagacgcccagggagatcgcgcgcacgagcctgcgcctgctcagcgacaaggacgcgcttgaaaagatgggcgacgcgctcgacgccgccgtgccgcacaacgccgcggccaacatcctctccgagatgagtgaagccgaggaggagaaggaggaagacctcgcatgatcaaacccagcgttgactaccgccagttccgcttcagcagactgaacacgccggagttctcccacgtgtggctgctgctctactggccgcttttcggcctcggcttttcgtatgtcgagcgcttctaccccgtggcgcactacatcaacatgcactgcgcgctcgacgatctgattccttttaatgaatggtttctgatcccctacctgttctggttcgtctacctcaccggcgcggtggcctacacgttctttttcgacgtgccaggctttcgccgcatgatgcgcttcgtgatgatcacctactcggtgacgctcattatctatttcctctttcccacctgtcagatgctccggcctgaggtcttcccgcgcgacaacgtgctcacacgctttatcgcgggcttttacgtgtttgatacgaacacgaacgtctgcccgtcgttgcatgtcatcggctcgatggcggcatttttcgccttctggtatgcgcccatcttctccaagcgcggctggcgcattgcatcgaccgttgcagcattttttatcagcatttccaccgtctttatgaagcagcactccattctggatgtcgccgcagccatcccgctgtgcgcgatcggctattattttgcctacgtcagaacgccgaaaaaatcccgcagcgccgtgccggatgtcacccgataagaaaatgcatccgcagaagctccgatcgcttctgcggatgcttcttttatacggctctttttcccttttcttttgcatatattcgcgcataattgcatatttttgtgaatttttggcttttcgcatgcatatttgtgcatcttgcatagaaaggcgtcgaaagttctggcattttttgagtttttaatcgttgacaatgaataagtaaacatttatactaacgctatcgtttctgaagcgtatgaaaattcgttcaacgatcaaacattatacaagatggaaagaaattgaaaaaggagctatcaaccatgaaaaagtttactgcactgatgctggctctgatgatgagcctttcgctggtcgcctgcggcaataagaccgacgacagcaacaacgccgatgatgccaacaccgacaacaacaccgagcagaccggcggcaagctggtgctcggcacctccgctgactacgccccgtacgaattcatgtatgccgatgacagcggcacgatgcagtacgccggtatcgacatttccgccggtcagtacatcgccgatgagctgggcaaggagcttcaggtcgagaacatgagctttgactacctgctcacctcccttgccaagggcgattttgatatcgtcatggcggccatcgaggtcacgcccaagcgtctccagtccgccgacttctccgatccctactacaccgacctgccggccatgatccttgtcaaggctgacgccgccgatcagtacaacaccctcgccgacttcgccggcaagagcgttggcgcacagaccgccaccaccaaggaagccatcgtcaccgaccagatggaaggcgcgaacctcgtctccctctcccttgtgactgacctcgtcaacgagcttgtctacggcaaggtcgacgcgatcgtcgtcgatggcgctgtcgctgagcagtatgccgaggccaaccccgatctggccatcgctcccgcctcttccgagctcggtgaagctcagccctactgcatcgctgttgccaagggcgaccccaagggcctgctgcccggcatcaacgaggccatcgccaagatgacttccgagaacaagatggaagaattcatcgccgctgccgatgagctgagcggcaaggccgtcgaggtcaccgcggacgctcctgcggcctaagttctcccctttaactacgctctcttctcactatctctcatagccaatgagcaaagccccaaatggctttgctcattggcatctcttaatgaaaagaggcgagcctcttttcattaaattctcactccactctgtgcctcgcccccgcaagcgggtgcttcgacactcgctccgcgcaaagtgttttttgccacgcgcatgtcgtggcaaaaaacgagcaagattttttcgcgctggcagcgcgaaactctgcgaggcttatcccagctaaatcacacatctgaaaggagatctctcccatggatcttgccacgcggtggagcaacctctttgtcggcatgtcgccggcgtcgttctttaacttttcctttttgccgaaatacggcgtctactttttgcaggcgctcggctacacgctgctgctggccgtcatttcggtcctgctggccgtcattccggcgctgctgctcgcgttcatgcgcctgagcaagaataagtttgtgcgcggcatttccggcgcgtacatcgcgatcttccgctctacgccgctgctcgtgcagctctcgatcatttacttcggcttttttggcgcgatctccatcccgcgcctgtacatcttcggctttatcgacatttcccgcttcatccccggcgttgtagccctcgcgctcaacagctcggcctacgttgccgagatcttccgtgcgggcatccttgccgtcgacgcgggccagactgaggctgcgcgctcgctgggtctttccgccacgcaggcgatgaagctcgtcgtgctgccgcaggccatcaagaatgtcctgcccgcgctcggcaacgaggtcgtcaccatggtcaaggaatcgtccatctgctccacgctcggcatggtcgagctgatgttcgccgcgaagaccgtggcgacctctacctacatttccctcgcgccttacgtgctggcggcgttgatgtatttctgcatcacctaccccgccggcaaggcgatcgaagcgctcgaaaggaggatgcgtcgtggcgacaagcactaattctctcattcgcgtgacggacgtctgcaaggagtacaacggcggcagcgtccacgcgctctcccactgcaatttaagcgtgaaaaagggcgaggtcgtggccatcatcggcccctccggcagcggcaaatcgacgctgctgcgctgcctgaacctccttgagcagccgacctccggcaccatttacttcaaggacgtcgccctcaacggcaagaaggtcaacttggacctccaccgccgcgagatgggcatggtgttccagcacttcaacctcttcccgcacatgacggtcaagaagaacatcaccctcgcacccgtcaagctgggcctcaagtcccaggaggaggccgacgcgcaggccatggcgctgcttgagcgcatcggccttgccgacaaggcgaacgagtatcccgcgatgctctccggcggccagaagcagcgtatcgccatcgtgcgcgcgctcgccatggcgcccgaggtcatgctcttcgacgagccgacctccgcgctcgaccccgagatggtcggcgaggtgctcgatttgatgcgcgaccttgcgaaagacggcatgacaatggtcgtcgtcacgcatgagatgggcttcgcgcgcgaggtcgccgaccgtgtcgtcttcatgtccgagggcgcgatcatcgaagagggctcccctgccgatctcttcgaccacccgcagagcgaaagactgcaatcgttcctcgcaaaggtcctgtaatacttcaaaaaagcggctgagccacttttttgagaaaattgcacttcgctttgtgccttgccgcccctcgggcggctgtgacacacgctacgcgagaagtgtttttttcgacgcacacgccccagggcggcatctcttgccgcttcgcggcaattcaccttctgtcgccgcaaaaacgattaaaatttttcttgtgcctacgagcacaaaactctgcgaggcttttaaaaaaggcgtccggccagtggccggacgcctttttgttgtcggtatactgttttacatcttctccggtgcggagcagccgatgaccttgaggccgttggcgagcacctgacgggtcgcgctcgcgagcttgaggcgcgcgtcgatgacggcctcgtcctcgcccttgatgcggcaggcgttgtagaacttgtggaacgccgcggcaaggcgcatgagatagcggttgatgtagctcgggtcgtagtcgcgcgctgccatgcgaatttcctcggcaaaggaggagagttccttgatgagcgcgtgctcagcatcgctcgaaaggatggacaggtcgaccgcgccgggcttgacgctgtggccctcttcctccagcgctttgagcaggctgcaaattcgcgcgtgcgcgtactggatgtagtagatggggttctcgctgtcctcgcgcacggcgaggccgaggtcaaattccatctgcgtgtcaggcttggcattgaagaagtaacggcaggcgtcgacaggaatttcatcgagcaggtcggagagcgaaatggtcttacccgtgcgcttggacatacgcaccacctcgccgtcgcgcaccagcttgacaagctgcaccagcacgatgtcgagacggttcgtgccgtcgaggcccagtgcgtccatcgcgcccttcatacgggccacgtggccgtggtggtcggcgccccagatgttaatgaccttgtcgaagtgacgcacggcgaacttgttgcggtgataggcaatgtcgccggcaaagtaggtgtagaagccgttggcgcggcgcagaacgtcgtccttgaggtcgagcttgtcgatgtcctcatccttcttgccctgcttgcggtactgctcgcacatgatgtcggcggtcttgagccagagcgcgccttccttttcatacgtccagccgagcttatgaagctcctcgacggtgtctttgacatagccgctgttgtgcagcgaggactcgaagaaccattcgtcgaacttgatgccgtagcgctcgaggtcgctcttcattttcggaatgttgcgctccaggccaaagcgcgccatatcggcgtggcgctcctcgacggacttgtctaaatagctgtcgccgtggacatcgtagaaggccttggcgagctcgcggatgtcgtcgccgtggtagccgtcctcggggaactcgatcgcatcctcgcccttgatgagctggatgtagcgtgcttcgatgctcttggcgaacttttcgatctggttgccgaagtcgttgacgtagaactcgcgccacacgtccgcgcccgaccagtcgagcacctcggcgagcgtatcgcccagcacgccgccgcgggcgttgcccatgtgcatggggcccgtggggttcgcggagacgaactcgaccatgtacttcttgccgtccagccagttgtcgcggccgtagtcgcccttctcctcctcaacggcggtcaggacgtcggcgtaccacttgtcgccgaggcggaagttcagaaagccggggcccgcgatctcgacgctcgtaaagtacgtgtcgctcaggtccatgtgctcggtcagaattttcgcgacctcgcggggattcttgcgcatggccttggacgcggccaggcagaacgtcgtcgtatagtcgccgttggcggtatccttggggatctccacggcggggatggtctgcacgccctcgggcagcaacccctcctgcacagccgcgcgataagccgccgccgtcagctcggcgatctggttctttgcgctgcggatcatattcatagcaatttctcctctatcctttgcggttttacccaaacggcgcggcacattcgcccgaaatcgccccatggggatacttttttgcaattatactatatttaatggcagaaaacaagggaatccggtaagaaatctgccgcggcgcgcttgccgttaaacgcaggcgcggcaaggccttttccgcgataaaaatcgctggtccagaaagagaatattttcgtgtccagttgggcgcggcagaggcgttttgacggcgcggtgcgcccgtcttgcatggccactgtgccgcctgtcagcgttttatcgcagaccagtatgcatttttctccgtgtgccagtgagcgccgtaaaatcgcgccactcttgcttttttaaccaaaaataatataataacgatagcattatttagatgcttttgagagattttgagagtaaaacgataaaaggaggactatcccatgcccgttaatctgaaaggccgttctttcctgacgctgaaagacttcacccccgacgagatccgctatatgctcaatctcgccgctgacctcaaggccaaaaagcgcgccggcatccgtggcaacctgctcgccggcaagaacatcgtgctgctgtttgaaaagacctctacccgcacccgctgcgcgttcgaagtcgccgcttacgacgagggcgcgaacgtcaccttcctcgattccaagtcctcccagatgggcaagaaggaaacgatggtcgacaccgccaaggtcctgggccgcttctacgacggcatcgagtaccgcggctacgaccagaaggtcgtcgagggtctcgccgccaacgcgggcgtgcccgtgtggaacggcctgaccgacgtcgaccacccgacgcaggcgcttgccgacatcctcacgctgatggagaacaccaagaagccgctcagcaagtgcaagctcgtcttctgcggcgacacgcgcaacaacgtcgcctactgcctcatgtacatctgcgccaagctcggcatccactatgtcggctggggcccgaaggagctggctcccgccgctgacgtcgtcgaatactgccgcgaggtcggcaaggagaccggtgccgtcgtcgagtacggtgaggacagagaactcatcaagggcgccgacgcgctctacaccgacatctgggcctccatgggcgaagaggacaagatccccgagcgcgtcaagctgctcaccccctacaaggtcacgggcgaggtgctcaaggccaccgaaaaccccgactgcatcttcctgcactgcctgccctccttccacgacttcgacaccaccatggccgcttcccagaaggagctcggctacgatatccgcgaggtcacggacgaggtcttcctctccccgaactccaaggtcttcgacgaggccgaaaaccgcatgcacacgatcaaggccgtcatggtcgcgacgatcggcaacgtgtaattgctgcaaaaacgataaaaagaatgggaacgccgagcgttcccattctttttcattttttacttttcaagctgggaccagtcgcgggtctcgcgcagctcggtccacttttcatactgggagttcgtcttgaactcgtaatagtggctgttggtcgttattataacactcaaaaaataatcttcaagcggaatcccgtcgaattttgtcagtagtaaaacttttaatacctgttgagttttgtcgttatttagaaataccttgcggtttaattggtttttaggcggaacagggagggcggatcgctccgccccctgtcctctctcaatctcgtctctctcgttcacttgcagtactgccgcagatcatagcacaggcgctcggcctcctgctcgccgcgggcgacgatcgccacggcgtcgttgccggagatgcagccgagcatatcgggcagcttcatcgcgtcgatagccgcgcccgccgcatcggcgagccccggcagcgtcttgagcagcacaacgatccccgcgtagtccacgcccacgctgcactcgttcaaaatgagcttcaggcgcttcgtgttgtcaatgtggtcggccttgccggatacggcgtagcggctgcggccgccgccgatcggctccttataaaggtacaactccttgatatcgcgcgagacggtcgtctgcttgctctcgatgccgcactcggcgagacgcgcgataagctcctcctgcgtctcgatattgtacttttcgatcagctccaggatcttctcttgtcgcttgctcttcatggctctctcccattttcctccgcccgaccagctgccggcgcggatgagctcttctctcttctctcgttctgcggtggaattttttacaggtcgtcgcggttgacggggcaggacatgcagcgcgggccgccgcggccgcgcgacagctcggcagacggcacggtcagcacgtcgaggccgtgctttgcgagcaagtcgttcgtcacatagttgcgctcataggtgatgacgcggcccggcgcgatacacagcgtgttcgagccgtcgttccactgctcgcgctgcgcggccatcaggtcgccgccgccacagcggatcaggtcgaccgcaggcagcttgagctcgagggccagaatgtccttgagttcttccttcagcgcgccgaacttgagctcgccgtgctcgtcgagcgtcatctcataaacgctcagcgggccctcgatctcgggatggatggtgaacttgtcgtagtcgaccatcgtgaacaccgtgtcgaggtgcatgaacgcgcgcgtctcgggaatgtcgaaggcgagcaccttcttaaagtcggagttttgcagaagattgcgcgcaaacgtctccgcgccggagaccgtcgtgcgctcggacaggccgatggccacgatgtccttggacagcacgagcacgtcgccgccctcgatggagtagctgtcggacaggtcgtaccacatcttgttgtcctgcgcggcaaagtcgcggttgtagaggaacatgtactttaagagcagactctcgcgtttgcgcgcaggggtatgcatgcggtggatgttgatgccctcgcccacgcaggcgccggggtcgcgggtgaagtacaggttcggcatcgggtcggagacgaacggatagtcgtcatcgactaagtccatcagcgacgtcggctgcttggtggcgacctcgcagcgcttgatgcccgcgatcatcttcgtcaccatctgcttgggcggcatgtcgagaagtaagctcgtcatgctcgcgcgcagtcccttggcgtggatcttactgatgttcaaaaagtcgttgacgagctggatctggcgcgcggggtcggcgatggccttggcgacctcgtcgacatagtagatgacctcgacgccgttttcgcgcaggacctcggcaaagcggtcgtgctcctcctgtgcgacctttaagtacgggatgtcgtcaaacagcaggcgctcgagcgtcgcgggcgtcagcgattccagctcctcgccggggcggtgcagcagcaccttgttgagctttccgatctcggaaaagttatggatgcctgaatacataagtcgtgctccctttcccgggatgccggcggctctctcatcgaccgcccgtacatcccgctgtgttttcgatcgtctcgccgcaatgcgcggcttctttacggatcgttttaccgttattacgcagtaaagtatacacgttctaaaagcgcttgtgatgtatcagtggttttgccattttgtgtgccagttactcctccagttcttcttccagcgctttgcgcaatacctccatgccgcgctccagccgctcgcgcggctcgtaggagtagttgatgcggatatggtcgcgcccgccattcttgcaggggtaaaaaacgtgtccggggatcagcgtgacgcccatgttgtaggccctgcggatgaactgcttgctgtccaccccgtccggcagcctgcaccagacatatacgccgcctctcggctttgtataactcacgccgagcggcgcaagctcgtcgagcttttggcataccaaatctcgattcgtgcggtagacgtcgcgaaattttaaaagcgacgtgtagtaaatgccgtcgtccaggtacatgccgaggagcttctgcgtcatccagtctgaggccatcagccgcacggagacgaggtagctcagcgcgcggataaaatcgcggttacccgtgatgaaagcaaggctcagtcccgggatgaacgtgagcgagaacgaatagatgtaaataacatttcccgtcgtgtcgaaggccttgatcggcgggagcttatcgccgtcgtagacgagttcgctcgccgcgtcctcctccacgatcggcacgcggtagcggttcgagagctcaacgatcttcttgcgccgctcgagcgacaaaatgtttcccgtcgggtcgtggtagctcgaattgacgaagatgagccgcgggcgcgtctgcgtgagtaagctttcgagcacctcgcagttcatgccgttctcgtcgacgggaacggtcaaaattttcgcgcccgcaagctccatcacacggtacatatcagggtggacgggctcctccatcacgacgctgtcgccgggcttgacgagcagcgtcacgataaagtcgagtgcctgattcgtctccgataggatctgaatttcgcccgaggatgccttcacgcccttcgtgccgagaaaggccacgagcttctgccgcaagaatttatcgcctttataggggctgaaaaaatactggcacgggccgctgcccgtgagcagtgtcgcaatgtcgcccgcgacacgctcggacgtgtacacctcgcgcgaggcgacgccgctgccgagggaatagtggctctcgtccgtaaagcgctggaacaggtcgtcaaacgtcttttccatgtcgaggtacttttccgccacctcgctgacccagttgacgcggccgggctgtgcgccctcgccgcccctttcgtcctgcgcgtccttttcgtcgtttgccgcggccacgatgtagcccacgccctggcgcgactcgatccacgcgtcgctcttgagctcgctgtacgccttgaccacggtgttgcggtgcacatccaagatctgcgcgagcgcgcgctcgctcggcagcgcgctcccgcggggcagcgcgccgctgatgatctgcgacttgatctggtcggcgatctgcagatagaccggcaccttcgaatacttgtcaatgctgactttcatgtacttctcttctccctctcgccggcaggccgcgctctcacccgcagccgtcgggatttgcgttggtctcgcagaggtctctctgttcgcattttaccacatagccgtgtgcgttgtacagtcatttttgtgcatatgacataaaatccaaaaagaaagagccaaggcatcccgatgagatgcctcgactctttcaggtcagcaacctgagtaagggaaaagaagcttttcctttttagaacagcagatgcgcgatagggcagacgatcagcaggctgatgatggtgcgctccaggaagatgacgaacagctcccagatgttgagaggaagtttggagccgaggatcaggccgccgacctcggagaggtaaagcacctgcgtgacggagacgaccgcgacaataaacttggccatctggctggtggactccgcgatcaggatggcgggggtgagcatgtcggtgaagccgacgatcatcgtggaggcaacagcatccgcttcgggcacctgaagaagctggagcagcgggcggaacgggatgccgagccattcaaagatcggcgtgtagttggcaaggatcagtgcgatggtaccgatggccatgacggagggcagaacgccgaaccacatgctgcaggcgttcttggcgccgctcttgaagaattcaccgatgcccttgtgctcggcaacgcgcttcatggcgaggtccatgccgtactcaacgttgctcttgtagccctcaggaagagtgtcgggagcggccttgccttcgactaagtacgtgttgggctttttgcgcaggggatagagatacgggcacacgatcgcgcagacgataccgacgaagcagacgatcaggtagtagatgccgaacttgtcgagcatgccgaccgtgtcgagaacgacgagggtaaacgtgatggaaacggcggagaacagcgtggcgatgatgcttgcttccttggcggaatagtagccaccctcatactggttgcaggtgagcataacgccgagcgtaccgtcgccgatccaggaggtgatgcagtcgaccgcagcgcggccgggaaccttgaacagggggcgcatgaccttggtgagcagcgcaccgacgaactccagcaggccgaagtcgagcagcagcggcagcagcagggccgcgatgacgaagatgatgacgagcgtggtgagcaggtcatagaggacaaatccgccctgaccgccgccggtgatcataccgatgagacccacgccgtcctcgccgacacccagataggtgagccacacgaagatgaccgcgagcacacggatcacgacccagatgggtttgcaggcgaagcattccttcatgatgtcgctattcataatgaatttgggctttgccagcgcaatgagggacatcactgccgaaacggtgaggatcagcacgcacagcagcggcaggaagccaccgatgacaccagagatgatgtcggccaggatcttaaccacaacggtccattcacctgctgcgttcttgaccgggatcatgaacaggatgacgccgacgactgacgggatgataaacagagctttcagtttcgcgttacttttggtttccattctctctcctccttcatattggcaagtcgcgccggaaggcggtctctctcatagccgcttccccggcagacagctcttgcctttactttatacgaatttagcagtaaagcaagtgccagcaacgttctcaatttgtataccagcaataaatttctccattttgtcattcacttttttgtcgaacctgtatgtatcttttttgctttttgggaaaaagcccattttcccttgccgtttcagggattttggagaagaaaaagggagacgcgatacgcgtctccctcccgtttgctttattgcaagttttcaacgtccttcttgccgaccgccatgcgcttccattgctcaggaaggcccggcgcgatgagcgggaacagattttccgtgtccgacgtcggctggatgttataggtgccgtacttgttgacaagatcggcgcagtcgtccggctggccgaagcgcgccttgagcatcggtgccaggtcatacggcataccggggtcttttcgcggcataaaaatcacctccggacttagtatgtccggaggcggcagattttttcgatttgtctcgctcacgcgcgcagcgacttcggatacacgcccttatcgtgcagcttttgaagctcgcgctgcaccatttccttatcctcgtgatacgtcatgccgaaccagcgcgcgctcgagcgcagaacggagacactgagctcgccgcggtcgatgagctcgccgatcaggctcggcagcaggcactcttttttgagctcgccgtcgggcagcgcgcggaggaaatccttaaaatacgcgtccagcttttcaaacagccacggcgtaaagccccagaagttcatcgagaccggcgtctccggcgcgtagaccggaccgtcgccgtcttcctgaatgtcgcggatcttgccgtcgtcgcagggctttaagtggaacgtctcgaccacgcggtcgagcatcccctgttcgttcacgtggcacacaccgcgcgtgaccgtgccgtgctcgctcacggtgttgcagaggtcatagccgaccatcgtgccctcgccgctttcggcgagctttgagagctcggcgtaaatggtcttgaacgcgtccacgccgtaatagtcgtcggcgttgatgacgacgaacggctcgtgcacaaattcgcacgcgcacaacagcgcgtgcaccgtgccgaacggtttgacgcgctccccgggcaccttataaaaatcgggcacgctcgaaaaatcctgatacgcgtagcagacctcgacgttttccccgtccgcggtctcgcgcgcggcaaggtgctcgccgaccatgttctccatcaagtcgcgcatgtcgggtttgatgatgaagaccaccttcgtaaagcccgcgcgcagcgcgtcgaaaatggagtattccatcaaaatttcgccgttcggaccgatgccgtccacctgcttattgccgccgtagcgcgagcccatgcccgccgccataatgaccagcgctgctttcataaaaacaaaactcctctcaaagttctcgatctcgttgttccgagctgcgcaccgcgcgctcgtctccgcccatcatagcgtatccgaaccggcattgcaaccgtctttttcgtctcttgtcttttgccgcaggcgtgttatactggtgtaactatttcttaacaccgaggtcacaccatggaagcatttctgcatgcggtctcttccgtcaccatcatcctgctgctgacggcgacgggctatttctgcgcggccaagggctggatgggcccgcaggccaaagcctttctcggcaagttcacgctctccgtcgctgtcccctgcatgtgcatctacgggctgctgaacaacctttccaaggagcttctcgtccagtcgggcagctttctgctcgtgccgctgctcggcaccgtcatccttattctgttgtcgctgctcatcggcaggctcttgaagctgccgcgcaaaaagctcggcgtctttatgatgatgtgctcggtgtcgaacgccatcttcgtcggccttgcgatgtgcaccgagctctttggcgacacctgcacgccctacgtcatgctctactaccttgtcaacaccagcttcgttcagctcttgtttctctcgcttgtgcgctggtcgggtgagagccgcggctttgacctcaagatgctccaaaaattcctgaccacgcccgccgtcatcgccgttttcgtcggcctcgcgctcgtgtggtttgaagtcaaacttccctcgctcgtgatgagctactgccgctatatgaacaacctcgtcacgccgctggcgctgctgctcacgggctatatcatccacgacatcgggctcaaaaatgtccggctcgaccgcgacctcggcatctcgatgatcttccgcttcctgctcgcgccggcgctctcggtcgcgctgtgcagggcgttcggcgtgacgggccttgcccatgacgtgctcatcgttgaaacggcgatgccggtcgtcacgcagacggtcgtcgccgccgcggaatacggcgcggacgaggaattcgccgcgcagggcgcggcgctctccacgatcgcgtgcttcgtcgtgattcctgtgctgatgttgattttgtaatcaaaaaagtggcaaagccacttttttgagaaggtttcgctgcgttctgtgcctcggttgtccgctaaaagcggacaattcgaccttacaccgttgcggcactacgattcccgcgcccttgcaggcgcgccaatcgtgccgcttcctcgaaaccgacttgctgtttccgccgctggcggcacttcgccggtttccactttgcgcaaagagttttctgccagaaggtgaattgccccgcagcgggcaagagaagcccctctggagggcgcacatgtcgcggcggaaaaccgatttgaatttatttcgtgccgtgcgcggcacctgggcagccgttggcagctttgctgccttacggatgctgcgtaccccttgcgggtaaaaactctgcgaggctctctaccctgaaaagaattccgcgccgtgggcgcggggatttttttatcttcaatttccgatcagtgcggacaggccgccggttttcagctcgtctttgtagtagttgagctcatcgccgatgagctcgtcgagcacgcgcatgcccaacacctcgacaggggccttgtcgtccgtcaggatgcagcttccgccctcatagggcgtgagcttggagtacaccgtgcgcatcatgtcggcgtagtcgctgtccttgagattcgcgatgctgcgcaggaacgtctcttcccagtcgtctgcattcgtgcagaagacctcggtattcgtgttgcccctcaccggcgcggtgacggtgtgctggaagacactcgccatcgtgtcacagaggtattcgttgatcgagccgttctccgccgacgtcatgttgaggttcacgaccatcacgccgttcggcttcaaatgagagcacacctcgttgaaaaactcaacgctcgagagctggaacgggatcgtgatgtcctgataggcatcgaccatgatgacatcaaacttttcctcgctcgcggctaagtacgcgcgcccgtcctcgaccgcgacggtcacgctgcctggaagtccgaagtagtccgtcgcgatgtcggcaatttttttgtcgatctccgcgccctgcacactcgcgccggggaaatagcgcgtgcagtagctcgcgtacgtgccagagcccatgccgaggatcatcacgctgcggtcttcgttgtccgtgccgtccatgcccgccatgcagggcgcggcgagcgcgtagtcatagtacatgcccgtcagcgcgtcgcccttgacctgcacgctctgcacaccgaagagcacgttcgtcgagagcgtcgtgcgcttcgcgtcgtcctgcacctgcaaatagttgtagatggactcgtcctcaagcgtgatgtcgctctgccagaaggcgaagctgtaagacggcagggcaaagcacagtccagcgatcaaaaggatggagacgatccccggcacgctctttttcttctcgaacacgaagtacacgatgccgatggccgcgagcacaccggagaagatcaaaaacgttgccgccgtgccgacggcggggatcgtcacaaacgtcggcacgaaggttccgatgatgctgccgatggtgttgagcgcgttgagcctgcccacggtcttgcccgtgtcgtcgagattgtcgaccgtgaagcgcgtgagcgacggcgtgacggtgccgagcagcacgcacgggaacgcgaagatcacaaggcacgccgcgagcgccgcccagacgaggaagtttttcgtcacaaaaagcgccagcagcagcgagatgcccgcgatcaggtaccgtcccacaaacgggatgagcgcgatccagatggccgcgatgatgaggcggcggtagagcttatcgggcgtcgcgctcctgtcggcgagcttgccgccccagacgttgccgatggccatcgcgatcataatgacgccgatgatcaccgtccacacgatctgcgacgagctgaagtacggggccatgagcctgctcgcaccgagctcgaccgccatgacggacataccggcaaaaaattcggtcaggtataaaaagtatttgctgcggatgagtttattttccatgcaggacctccctgtcgtttcgtctgtgccgtcttcggtgtagacagagaaattataacacgcctgaaccgctttgcacaacgtttttgccgcgtattcattcccgatgcgcatattccctctctgcacgcatatagatggagcaacatgagtcaggagtgtgctgcatgaagggtaacatggaagagcgcgcctgcgcgctggccgcctacatcatcgaaaaccgcgccaccgtgcgcgccgcggcaaaaaagttcggcgtgagcaagtccaccgtgcacaaggacctgcaggaccgcctgccgcagttcaaccgcagcctatacttacaggtcaaagaggtgctggaggtcaacaaggcccagcgtcacatccgcggcggcatggccacgcgaaaaaaatacaagggattttgaaacttttttcgactttttgcgtctaacataagagtgcgcctcccgcgcggcaaaatttctcttgcacaattccgccgcgcagggtagaatgcattattgtcaaccaaaagaaaacagaacggagcaatgagatgagaaaacaggactattacgagcccgactttgacgacgtgccgcgccgcagcaaaaataccaaaaagcagaaaaagaaaaagtccggcagccgcggcgagcgcgcggtcgtgacgcttctgtcgcttcttttcctgaccgtggccgtcgtggcgacggtcaagtacgtcgtgcgcgcgcccgagcccgtcacggacagcgaagaccagcagacgcagcaggacggcacggcggaggacagcgacgccattcaaaccatttctaacggcaaagagcgcaaaaaatactgctatacgatcctcgcctacggtgtggacaacgacgccggcggcagcgacacgaacatgctcgtgcgctttgacgcggagaacaagaagatcgacgtcgtcagcctgccgcgcgacacgctgatgagcaacggtcacaagctcaattcctcctacaataacggcggcacggaaaagctgcgcagcaacattgaagatatgctcggcgtccccgtggacttctacgtctccgtcgacttaaaggggttcatcgcgctcatcgaccagatcggcggcgtcgacttcgacgtgcccgaggatatggactacgacgacccctaccaggatctgcacattcacttcaaaaagggattgcagcatctcagcggccagcagtctatggaggtcgtgcgcttccgccacaactccgacaaggataagcccgcctacggcgggcggcaggatatcggccgcatcggcacgcagcaggcgtttttgaagaccgtggcgcagaagctgatgaagattgaaaacgttcccgcgatggcggaaacgttcttaaaatatgtcaagaccgacctgacgctcggcaacctcgtgtggctcgccaaccaggcgctctccatgggtgggacggacgccatcagctttgccaccctccccggcgacggcgcgggctggtacaatggcaagtccttctacacgctctatcccgagcaggtgctcgagatgacgaattcgatgctcaacccctacgctacggatatcaccgccgacgatcagaacattttagtcccgtgatccccgtgaaattttgagaatgtgagaaagagagagcaaacgccatgaagttccgctttgcgctgcttgtcgcggcgctcgcgcttgcgctgagcatcagcgcttttgcttacagtgatgagcccgcgcaggacactgccgctcccgcacaggaggagatgacgaccgaagacagcgccccgtttgtgcttctccgtgtctacgaggggcagtttgccgacgtgaagaacggcgactggttcgcccccccggtcgtctcggcctatgaatacgggcttttgaacggccgcagtgagagttcctttgcgccgaacggcaatgtgacgatcgccgagcttttgaccatcgccgcgcggctgcgcgccatctatacgaccggcagcgacgcggtcatccccgccgcaaaggagaatgaggcgtggtacgcgccgtatgtctcgtacttgaagagccagaatttgctcgacaacagcttcgagggcttctacctcctgcccgcgtcacgcgcgcagatggcgggcatctttgccttcgccgtgccggaggaatggtacaccgaacccaacgcctcgctcgtcacctcggcctacgcgagccgcgagtacattaccgacgtgacggacaaaacgccctaccgcagtgaaatacttctgatgtaccgccgcgggctgctctccggcatggacgcaaagggcagcttttaccccgaccgcagcgtcagccgcgcggagatcgcggcgcttttgacgcgcgtggtcaagcccgaaacgcgcctgacgctcacgtggacggtcgcgccgtatcactccgtcaaaaacgcgacgctcgcgagccttgtcaaagcgccggcaagcacgtcgctcccgacgtctgccaaggacaccgccgccatcgacggtttggttcgcaatatgctcgcgcgcggcgagcacacgatcacgctgaactactccaaggccctcaccacctctaccgccagcgcgctgacgcaggcgttcacctcctgcgtcaagacgtactgcgagcagatgtacaacgctgtttcctgccgctcgtattcgacgggcaaggtcgtactcacgttttcgtccaccgcctgtacggacaaaacgctcgaatcgtaccgcgccaaggcgctcgccgccgcgatcaaggtccacgactccctttgggagagcggcacgctgagctacgacatgagccagtatgagatcgcgcgcacgtattttcaatggctgtgcgaccactgccgctacgacaacgccgccgcagacgattccgcgagccatcttgcctacggcgcgcttgtcagcggccttgccgtgtgcgacggctacacgggcgcttacaatctgctcttgaagctcgagggcatcgagtgcacctcactttttaacgacagccacatctggacgctcgcaacgctggacggcacgcagtaccacatcgacgtcacctggggcgaccagtacggccgcacggatctgcgctacttcggcatgagcgaggagcagtcctaccagtgccacccgtggggcacagcggacaaaaagaaataaggatcgacatatagggagccctgagacggtatgtctcagggctcccttttttatcaccattcgagctttgtgcgcacgtgcgccaatggcaggtgaaagctctcccgcaagacgttgcgatgttccggaggaaagtgctcctctgaaaattcatacagcggcagcaccgaaccgtactgctgcgcggtctcgtagaaccagcagccgaattccagacgttcgagcttcgtttgcagcgccgcgatctgcgcgcggacgttgtcgcgctctttggcaaggatgtcgcggcgggcgctgagcgtctctccgccgggccggatgagcggcaggaacgagcggatctctttgagcgggagcccgcagaatttgagatactcgatgatcgaaagcgttgcaatatcgtcgtctgtgtacgctcgctgcccgttgctggcgcgcaggccgagagacagcagcccctccttttcatagtagcgcagggtcgatggggcaatattcatcatgcgtgccacttctccgattgtataaggcatacgaaaaactcctcaaaaaactgttaagatgaccgcgcgaaaatctattgacttaaaggcgactttaatagttacagtttacttatccaaatcggtattgtcaacagaaattaacgggtaaattctcttccgtttgtgcatgatgttccggtaccgacagtttttaagaaggagaaaagaagctatgagaaaaatgatgcagcgatccctgagctgtctgctgactctcgcgatggtcgtcacgatgctgatgaccagcacgctcgcagcagaaaagaacgcaaaactggaatttgactattccgccaactacaaatcccacaccggcctgagcatcgaagtctacaagggctaccctgcaaacggctacgccgcagaggaagagatcctcaagcagctcgaagccgtcaagcctcagtccgacggcagctacgctgtcaccgaggtcggcacctatgcctaccacgttcacggcacgggctactataacattctccagctcttcaacgtgaccgaggccgacctgaccgcgggcacgaagaagctcaccgtcatcggcggcaagctcggcggcaacggctacgagccgaccatcaagcccgaaaaggcccccgattcttacaaaatggatgcccgcgacagcatgctcatcttctggccggaggagatcaacgattccttcaccgtcgctccgcagggctacacgacgcccgccttcgacggcaagcacgccgccaacgagttcacctctcaggaccagatgatggctttcctgcagaagatggacaagtcctccgacgttatgcacctctactccgccggtacgaccccgaactacaagtatgacctccccctagcactcttcaccacctccgagatccccgcgaacgccacgctcgccgaggccgccaagatcgtcaagagcaacggcaagctgaacgtctggtatcaggcgcagatccaccccaacgagcctgccgccggtgaaggcgcgctcgtgatgatcgacaactttgtcaacgatcccgcctacaaggcgctgctcgacaaggtcaacattgtcatcgttccccgcatcaatcctgacggttcctacctcttcagccgcgcgacctacgacggctttgatatgaaccgcgaccacatgtccctcaaggccgccgagcttgcccagctccacaccgcctaccgtctgttcatgagcgaggtcgttatcgacacgcatgagttcacgttctacggcgccaaggacggcatgatgaacaatgccgacgaccttgagaccactcccgccaccagcctgaacaacaaccccgccgtgacgaagatcggtctcgacatggccaagcgcgccttctccgacgctacgaacgccggcctgcgcgtcaatcactacggcaccaccgtcaataaccccatcggccgcgcctactttggtctgttcaacgcggtttccttcctcattgagacgcgcggcatcggcgccggtcgccagaactttgagcgccgcgtcttctctcaggaagttgccgccacctcttacatcacctatgccgccgagcacgccgacgagatcatgaaggcggttgccgccgcccgtgccgatgttgtcgccaagggcaagacctatgaggaaagcgacgttctcgccctctatcagaccaagtccggcaagaccctgaccgactacaccgccgcaaccgtgcagtacagcgtcgccgacggcagcgagaaggtcagcaaggcgaattctctctccctgaacgacactctgacccgcagccgcgtccgcccgaccgcctacgtcattcccgcagacaccgccaacatcggaaagatcctctacatcatggacaatcagggcgccgagtactacaagctcaacgccggtaccaccgcaagcctccagcagtactactatgtcggcgactacatggtgaacggcaaggccaagggcattgaggccggcctgcgcgacaccgccgacgtcaccttcaccaacggcgcttacgtcttcccgatggatcaggtcgccggcaacgtcatcgccatgctttgcgagcccgacgtcaccgactccaacggctacgacggcacgctctatcagtacaagcagatcgactacgataaggacagcaagaacttccccatgtaccgctacaccggcaacgacccgcgcaccacgcttgtgagcaacggcacctccgccgagcccacccagcccgcgcagcctgaaaagcccgctgagaagccctcccagcccgcgagcagcgatacctacaccgtcgtctccggcgacagtctgtggaagatcgccagcaagcagctcggcaatggcaaccgctggactgagatctatgacctgaataaggacaccgtcaagtccccctcggtcattttcgtcggtcagatcctcaaaatgcctctcacggcagtgagccagtaaaaaatacgccagtgttttttctccacaaatccccttcgaacgggaaagcgccttccgcgatgcggaaggcgctttcctttttattttcaaatctcgaattgctgaccgtcgcgcgtgatgcgcgcgatgatgcccttttcgtccgggtgcgcggcgatgtagcggtcgatgacctcatactttttccacatgtgcatcgggaaaacgtgctgcactgtcacgtttttcagcagatactcgatgccgaggccctcgctgccttcaccaaggcgcgggtcaagcggcgccatcgccgccgtgatctcgggcgcgatgttgttgtccgtcgcctcgttgcgcacggcggaggcgagcttttcaatggccgcatggtagtggacggtcatgttgttgcagtaagccttgccctcgctctcccagttccaccagttgaggtcgcccccgtggtagaccatctttccctcgcagcgcagaaggtaggcgttgccgatgtccgtcgacttgatggcgcggatgctcaaatcctcgcccgcgacgtcggtgagcaggatgctgtcgggccgcagaacagtcgtgcgggcaaaggcctcgtcggaaatgttgagccactggcgcttgcgctcggtgaggcgcgtatcgcgcgagacgaaaaagcgcgcgtcggggtacttttccaaaagtgtgaacaccttggcgtcgaagtggtcctcgtggctgtggctcgcaaagacgagcagcggcttgtctgggttcagctccggcagctcgcccgtgtagtcgggctcgtaggtgtagtcaaagagcgtatagaacttgtcccactcgacaagatacgcgctgtgggcgataaacgtgacggtcatgcggtttctcctttcgctctggaggatggaagtttgcttgtagtatcatagcagacgccgcggcgcggcgcaaggggaaaaggctttgcaaaatcgcgcggatatggtaaaatatttgaatctatcccctgacttcacgaaaggagccgcgcgatgctgaaaaaagcctacgtcgagatcacgaaccgctgcaacctcgcctgctccttctgtcccaagacaaagcgcgcgccgcgcacgatgagcgcgcaggaattcgaccttatcctctcgcggctcgaggggtatgtgcagtacgtctatctgcacgtgatgggcgagccgctgctgcaccctgagcttacgacgctcttcgcccttgccaaggcgcggaacatgaagatctgcatcacgacgaacggcacgctgctccaaaagcgttccagtgagttgcttgccgccgaaagcctgcacaagatcagcgtctcgctccacagttttgagggcaacgacggcgcggacgagcaggagctttcttacctgacacaggtctggaactttgctgaaaaggccgcgaaaaaacgcgtcatcgtagcgctgcgcctctggaacgacggcggcgcggacgcgcgcaacggcgaaattctcgactttctgcgctctcgcacggggaatgactggccggagatgcgaaacggcagctttcttctgcgcgaccacctgtatttggagcgcgcgggcaagttcgactggcccgacctgagcgccaacgaatccggtgcgcagttctgctacggtctgcgcgaccagctcggtgtccttgtcgacggcaccgtcgtcccctgctgcctcgatcacgagggcgacatggcgctggggaacctcttcactcagccgcttaccaaaattctgaactccccgcgcgcgtgtgctctgcgcgagggcttctcccggcggaagcccgccgaagagctctgccgccgctgcggcttcgccgcgcgcttcaacaaatgatatgatgacagaacattgggaaaacttaaatgctctgaccgcgccgctgctcacgtggtatgacttaaacggccgcacgctgccatggcgcagcgtcgtcacgccgtaccgcacgtgggtctcggagatcatgctccagcagacgcgcgtgagtgccgtcattccgtacttcgagcgctttatggcagagctgcccgacgccgcggcgttagccaccgtgccagaggaacggctcttgaagctctgggaggggctcggctactactcgcgggcgcggaatctgcaaaaggcggcaaaggtcatcgtctcggactttggcggcgagttgccgcgcacctgcacattgctcaaaacgctccccggcatcggcgactacaccgccgccgccatcgcctcgatcaacttcggcgagccggtcgccgcggtggacggaaatttgctgcgcgtcgccgcgcgcgtcagcggttgcgccgacgacatcatggacgcgagggtacgaaagcaattcaccgcgcatctcaacgccgccatcgacttagcccgccccggcgcgtacaatcaggcgatgatggacctcggcgcgacggtgtgcctgccgaacggcgcgccgaagtgcgagatctgccccgcgcgaatgatgtgcgaggcgtacaaaaacggcctcaccgaagtccttcccgtgcgcgcgaagaaaaaatcgcgcagggtcgaagagcgcacggtgctgctgctctttcaggggagaaaggttgcgctgcgaaagcggccggacgcggggcttctcgcctcactttgggaattcccgagcgtttttgggaacctcgacgaggcgggcgtttcgcttgcgcttgcgcagatggggctttcggcaaagtccatcgagcccgcgggcagcgccaagcacatcttcacccatatcgaatgggacatgaagggctacttcgccgacgtgacgggcgaaaacgacgatctattctgggcggacgccgcggcgttcgacgccgccgccatccccaccgcattcaggaaatttgccgcgctcgttcgcgcgcggctgcaataagagagggagaacaacgaccatggcacagctttacttcaaatacggcgcgatgggctcgagcaagacggccaacgcgctgatggcgcgcttcaactacgaagagcgcgggcagaagacgcttctctgcaagccccagctcgacacgcgcgacggcgaccacatggtgcactcgcgcatcggcctcgaatatccctgcgtctacttccatgagatgcggcagatggacgaggaggagctcaagaaaaacgcctgcatcatcgtcgatgaggcgcagtttttgacaaaggaggaggtcttatacctcgtccatctcgtcgacgactgcggcatccccgtcctctgctacgggctgcgcgccgacttcaagggcgaccttttccccggcagctacgagctgcttgtcatggccgacaagttagaagaggtcaagaccatctgctggtgcggtaaaaaggccgcgttcaacgcgcgctttgacgcgcagggccatgtcgtcaagcagggtgcgcaggtcgtcatcggcgcgaacgaccagtacatcggcctgtgccgcaagcactggatgctcggcgacctcggccccgacttcaacggtcagggcacgggcgactgatgcgctgtgaaatttgcccccgtcgctgcaatgcggagcgcacggcggagaaagcgggcggcgtctgccgcatgcccgcgggcttagtcgtcgcgcgcgccatgctgcacctctgggaagagcccgtcctcagcgggaaaaacggcgcgggctgcatcttcttttcgggctgcaatttgggctgcgtgttctgccagaacgggcgcatcagccacgagaatttcggcaaggtcattacgccggcacatctgcgcgagatcatggaagacctcgtttcgcagggcgcgcactgcatcgatcttgtcacgcccacacacttcaccccatgggtgctcgaagcgctggatcagccgctccccgtccccgttgtgtggaacagcggcggctacgagcgcgtggaaacgctcagaacgcttgagggtaaggtgcaaatctatctgcccgacttaaaatacgccatggaacgccccgcgcgcgagctttccgccgcgccggactactttgaagttgccgccgcggccatcgatgagatggtgcgtcaggtcggggcgtatcagatcggcgaggacgggctgatgaagtccggcgtcatcctgcgccatctcgtcctgccggggcagatggagaacaccaagcgcgtcatcgactatgtttcgtcccacttcccgccgaagaccgtgctcttttcgctcatgagccagtatacgccgcagagcggcgcgaccggcgcgctcgcgcggcgcttaaatgagcgcgaataccgcacggcggtacaatacatgctcgactgcggcctgaccgacggcttttgtcaggagctctcgagcgcgaaagaggaatacacgccgatcttcgacttgcagggcgtctgagcggcaaacggtcacccagggaagcaaaatttgataacaaatcgaaatatctctcgataaaacaacaaggaggactcaatatggagcgtgtcagcaagcggaattactacttagacatcgcgcagacggtgcttgagcgcgcgacctgcctgcgccgcgtctacggtgcgatcatcgtcaaaaacgacgagatcatctccaccggctacaacggcgcgccgcgcggacgcaaaaactgcgtcgacctcggctactgcacgcgcgagcagctcaaggtcccgcgcggcgagcgctacgagctctgccgcagcgtccacgccgaggcgaacgccatcatctccgcccagcggcgcgacatggtcggcgcgacgatctacttggtcggccgcgacgcgcgcagcggcgagctgctgcacgacgcgacgagctgccccatgtgccgccgcatgatcattaacgcaggactcgacgaggttgttattcgccgcacggaaaccgaattcgacatcgttccggtccaaacctggatcgacgaggacgactcgctataacttcaaaaaagcggctttgccgcttttttgaaggagtttcgctgcgcttcgtgccttgccgcccgcagggcggctgcgacacacgctccgcgcaaagagtaaattccgacgcacatgtcgtcggaatttacgattcaaatttatttgccgcctgcgggcggcaaaatctgcgatgctttttgcctgtttgccgcccggaggcggcaaatgcggcgatcctactctttcaaatcgaaaaagtgcggtgcttatggcgccgcgctttcttcttttggggaaaaattctgtaaaaccttgcaaataccgccctttcggtggtagactgtaaataattacgccccgctttcattcggcgcgggcagaaaagaggaaaacaccaatggacaagaagaaattctatatcacgacccccatctactacccctccgacaagctccacatcggccacacctactgcaccgtagcgaccgacgcgatggcgcgctacaagcgcctgacgggctatgacgtcatgttcctgaccggcaccgacgagcacggccagaagatcgaagataaggccaaggccgcgggcgtgaccccacagcagttcgtcgacaacatcgtctgcggcgaaaagggcatcctcgatctgtggaagctcatgaatatttcgaacgaccgcttcatccgcacaacggatgactaccatgtcgaggccatccagaagatcttcaagaagatgcacgacaacggcgacatctacaagggcacctacaagggcaagtactgcaagccctgcgagagcttctggactgagaaccagcttgtcgacggcaagtgccccgactgcggccgcgaggtcgaggacgccgaggaagaggcctacttcttcaagctgagcaagtacgccgaccgcgtgcagcacctccttgaggacaccgactttctccagcccgcctcccgcgtcaacgagatggtcaacaacttcatcaagccgggccttgaagacctctgcgtctcccgcacgagcttcacctggggcatccccgtggactttgaccccggccacgtcgtttacgtctgggtcgacgcgctcttcaactactgcacagcgctcggctttatgaacgagaagtacgacgattacgacaagtattggcccgccgacgtgcattttgtcggcaaggagatcgtccgcttccactccatcatctggcctgcgatgctcatgagcatgggcatgccgctccccaagcacgtttacggccacggctggctcgtcatggacggcggcaagatgagtaagtccaagggcaacgtcgttgacccgtatgtgctcgccgagcgcttcggcgtggacgcgctgcgcttcttcctgctgcgcacgttcccgttcggctcggacggcaacttctcgaatgaactgctcatcaacaccatcaatgtcgacctcgccaacgacctcggcaacctcgtctcccgcacgacggccatggtcgaaaaatatttcggcggcacgctgccggaaagccgtcaggccgatgcgctcgacgacgagctcatctctcagctctcggcccttcgcggcaagtatgaagccgagatggagaagttccagttccagaacgcgcttgagctcatcttcaagtgcatccagcgagccaacaagtatattgacgagaccgcgccctgggcgctcgccaaggacgaggccaacaagccccgcctcgcttccgtcatgtacaacctgcttgagagcatccgcatctgcacggtgctgctcaccccgttcatccccgattcctgcgagaagatcttcgcgcagatcggcgcgtgcgagtgctgccgcgattgggacagcgccgcgaagtggggcagcctgagcgccaccgtcaccgtccacaagggcgaggccatcttcccgcgcgtggacgcgcagaaggcgctcgaagagcttgaggccattcaggaggcgcagaagaagtcagctctccccgcgatggagttcgaaccgatggtcgaggaaaaggtcgacttcgacacgttctgcaagtccgacttccgcgccgtcaaggtcaaggcctgcgaggccgtgaagaagagcgaaaagctcctgcgcttcacgctcgacgacggcaccggcaccgaccgccagatcctctccggcatccacaagtggtacaagcccgaagagctcgtcggcaagacgctcgtcgccatcgtcaacctgcccccgcgcaagatgatgggacttgagagctgcggcatgctgctctctgctgtccacaccgagaagggtgaggaggtcctcaaccttattatggtggatgataaaattcctgctggcgcgaaactctgctaaacaaaaagggagccggttcccggctccctttttactccgcgcaggcgcggagggaacgcagcgccaaaggcgctgcacgcaatgcaacccccattttctttcccgagaaagaaaatgggcgtcgcccgtccaaaagaaaggcgtttagattggcagtctcaatctcgaatgacctttatgcctccggaatggaaatgcctgcgcgtggcgaagccgcgtttagcgttgctatacgatttggcctacttctattatccgctgccgctctgcccatcttgtagaagtacacagtaaccaccgtctaccgaagcactccacaatgcggcgagcgccagcaatgccgcattcggcacgcagtctgccgccaagcaaacgtcactcgcgcctcacgatagtaaggcgcggttgatagttgtcacgaaacgcaggggttcatggcgaagccatgtacaccgcacctgattgcgcagcgcgtgcagctcttcaagataaaaactgccaatgtgcggggtcaaggggtaagaccccttgcctttctctgggggttccaaagggggtattctctttggaaagagaataccccctttgctcccgccgcccgcaggcggcatatccccgcgcccttggggcgcgaaaacccgccccctgtgggcctgcaaaggagaaaagagccatgtatgaatactttcatgtaaaagtcgccgccaatgcgtctattcttggcggattttcgcttgaccccgaataccggaacatcatcgaccgtgcagcggaggaaggctggcgctatgttggctttctgcctgtgtcgcagtcggtgaatggcgcgatccttgaatatgacctcatctttgagcaggagaagaaatgaatttgatttttgacacccacgcccactacgacgatgaggcgttcgacgctgaccgcgaggcattgctcgcgtccatgcccgaaaacggcgtggggctgatcgtcgacccgggctgcgacttggatacctcgcgccgcgcggtggagatcgcggaacaatatccccacgtctacgccgccgtcggctggcatccggaaaactgcgcgccctacacgcgcgagagcctcgacacgctgcgcgcatgggcaaagaacccgaaggtcgtcgccatcggcgagatcgggctcgactactactgggagcaaaacccgccgcgggaattccagcaggaggttttccgcgaccagctcgcgctggcgcgggaattaggtctccccgtcatcgtgcacgaccgcgacgcgcatgctgactgcctcgccatcgtgaaggagtttccgcaggtgcgcggcgtgttccattgcttttccggcagcgtcgagatcgcgcaggagcttataaagcgcggctggtacctgggctttgacggcccgctgacctacaagaacgcgaagaagaccgtcgaggtcgcaaagatcgtcccgcttgacagggtgcttctcgaaacggacagcccttacatggcccccgttcccgtgcgcggcacgcgcaacgactcgcgcaatgtgttccatatcgcggcaaaattcgcagaaattcgcggcatgcgcacagatgaaatcatcgccctgacgaacgaaaacggccgtcgctttttcggcattcaatcagcgaaagaggaacgaagctgaccgcttccgttcctcttttttcattccaaaactgaacggcgcggcaaatttgctggcaatattacccgattttgtccgcatgtttattcttccgctttagtcaagtgtgactaagttgcgaattttcccgcattttctgttgacgtgtgcttttcacggtgctatgatacccacaacctcaatatgattttcggaaaggatttcgacgaaatgttctcttacacttctcgaatgttaatgtgcatgaacatggacatggcgatgccgatgcccacgattgctcatgctcatttgcctgcccgatacgcacaggaacgaaattgccgccgctgattgaaagcgcgcagaagggtcttgccgcccgaacatcgtttgacctgaagcggggagctcatgagctccccgctttttttgtttgcttttgggataaaggaggaattcacttgatcgaactcaagaacatttccaaggacttcggctcgggcgaaaaggccgtgcacgccgtgcgcgacgtgtcgctctccatcggctcgggcgagatcttcgggatcatcggcttctcgggcgcgggcaagtccacgctcgtgcgatgcatcaaccttttggagcggccaagctccggcagcgtcttcgtcgcgggacaggacttgacggcgctctctgccaaggacctgcgcgcggcgcgcaagaagatcggcatgatcttccagcacttcaacctgatgccgtcgcgcacggtggccggaaacgtcgcctacccgctcaagggcagcggcctgagcaaggaggatatccagaagaaggtcgcaacgctcttggaactcgtcggcatcggcgacaagtcagacgcctaccccagccagctctccggcggacagaagcagcgcgtcgccatcgcccgcgcccttgccaacgacccacaggtgcttctgtgcgacgaggcgacctccgcgctcgacccgcagacgacgaaggcgatccttcaccttctcaagcacctcaacgaaacgctcggcatcacgatcgtgctcatcacgcatgagatggccgtcgtcaaagagatctgtgaccgcgtcgccgtcatggaatacggccgcgtcgtcgagcagggcgaggtcttcacggtcttcgctgagcccaagcaggccatcacgaagagcttcatccacacgacctcgaacctccgaaaggtcgaagagctcatcgccgaggattcccccgtcacgcgtctccagcccggcgagctcatcgtccgcctgtcctatgttcagcgcaacgtcaacgagccgatcatctccgccgtgtcgcagatgttcaacgtctcgctcaacatcattttcgccgatatcaccatcgtgcaggattctcccatcggcggaacggtcgccatcatcagcggcgagagaaagcagatcacgaaagcgatcgaatacctgatcgaaaaaaatgtcggagtggaggtcatcaaagatgcaagagctgatcgttaacattgccccgaaccttgcaagcaagctgccggacttttataaggccctcggcgacacgatgctcatggtgctctggtcgggcctcatctcgttcgtattcgggcttctgctcggcgtggtgcttacggtgacaaagccgaacggcattttggagaacaagatcgtctaccaaattctcgacaagctcgtgagcctgttccgctccatcccgtttatcatcctactgacgtgggtcatgcccatcacacgcgcgctggtcggcacggtgctctatgtgcgcggcgcgatcgtgccgctggtgttcggctcagtgccgtttttcacccgtcaggtcgaaagtgcgctcgccgagctcgacggcggccttatcgaggcggcgctctcgatgggctcgagcccgcttgagatcatcttccgcgtgtatctcaaggagagcatcgcggccatcgcgcgcggcacgaccatcacgatcgtgagtctcttaaacctcacggccatggccggcgtcgccggcgcgggcggcctcggcgacttcgccatccgctacggccacgaccgcaacatggccgacatcacgaacgtcaccgtgctcgtccttgtgctcatcgtctgcgtcatcgaatttgtcggcggacgcatcgtcaaaaagaacacgcattaacgtgatccccatacagtccctacccatcccattacaaaaaattattttaacggaggatatttccatgaagctcaaaaagttctttgccctcgcccttgcagccgccacgctcgccctcgcgctgaccgcctgcggctccaaggccgacgactccgctgacagcagcgatgccaacaccgacaatcagaccggcgagaccgtgaccgtcaagctcggcgtggtcggcggcatctatgacgacctgtgggcgcccgcgaaggccgcgctcgccgacgagggcatcgacctcgagatcgtgcagttctcggactacgtgaccccgaacaacgcgctcgccaacggcgacatcgacctcaacgccttccagcaccgcatttatctccagaacgagatcgacaactacggctatgcgatccagaacatcggcaacaccttcatcatcccgctgaacctctactcccagaaggtcagttccgttgacgagctcaaagacggtgacgtcgtcgccattcccgacgatctgaccaacggcggccgcgcgctcaaggtgctcgaagccgcgggcctcatcgagctcgaccccaacgccgccttcaaccccaccgttgacgatatcacgagctacaaggtcaacatcaccatcgaagaactcaaggccaacaccatcccctccgtcctgcccgacgtggccgccgcggtcgtgaacggcaactacgcgctcgactttggcctcaaggccgacgaggccatctacaaggacagcgtcctcgacgtggaggagtactggaatctgatcgccgcgcgcaccgctgacgtcgaagaccccgacaccgccgccatctatgagaaggtcgtcgaagccttccagtccagcgcgacggaggacgtgttcaacaacaccttcggcggttacttcatcgcagtgggctgggatcaggacttgatcaatcagtaaacaccatctgaccgccgccgcgctcccgcaacgcagggagcgcgggcggcggtacgcctttccgggaggaatttattatggcacttgatctttccgcgctgcggcgcatcattgcagacgaaaactgcctgctcaccggcgcggacattcccgcagaataccagagcgacgtgctcggccgcgtccacggcagcgccgaggcgctcgcctttcccttatccaccgaggaggtgagcgcgctcctgcgctacgcgcacgagcaccgcgttcccgtcacgccgcgcggcgcggggacgaatcttgtcggctctaccgtgccgctcgagggcggcatcatcctcgacctttcccgcatggaccgcgtgctcgagctcgacgaggacacgatgaccgtcacggtcgagcccggtatgctcttgcaggacttgcaggcctatgtcgaagcgcgcgagctgcacgaaaacatggacagggcctatgccgaagcctatcgcctcggcggcgtcgcctccggcgagcacggcatcgggctatcgaagcgtccctacttcctgcgccagacggcgaaggaaaatttacaggccatgaacgccatcaaaacggcgctcgacccgcagcatatcttgaacaacggaaaatcttatctcacaggaggaaacaataatgcaggcactttctgaccgcaccgcgagctttaccgattccgtcatccgccgcatgacccgtatctccaaccggtacggcgcggtgaatctttcccagggcttccccgacttcgacccgcccaagcccatcctcgaccgcctctctcaggtcgcctacgaggactatcatcaatactccatcacctggggcgcgcaggacttccgcgaggcgctggcgaagaagcagtcccacttcatgggccgcgacatcgaccccaacggcgagatcgttgtcacctgcggcagcaccgaggccatgatggctgcgatgatgaccgtcgccaaccccggcgacaaggtcgtcatcttctccccgttctacgaaaattacagtgccgacacgatcctctccggcgcggtgcccatctatgtgccgctcacgccgccgtcgttcacgtttgaccccgaggtgctcgaggacgcgttccgccagcaccccaaggcgctcgtgctgtgcaacccctcgaacccctgcggcaaggtcttcacgcgcgaggagcttgagatcatcgcggggcttgccaagaaatatgacgtctacgtcatcaccgacgaggtctacgagcacatcatttacgccccgcaccagcacacctattttgcgacgctgcccgacatgtgggagcgcacgctgtcctgctcgtcgctttccaagacctattccatcaccggctggcgccttggctacatcatcgccccgccggagatcatcgaccgcgcgaagaaggtccacgacttcctcaccgtcggcgcggcggcacccctacaggaggccatcatccccggcctcaacttcggtcaggactactacgacgcgctgcaggccgagtacacgcacaaaaaggacctgttcttaaagggccttgacgacctcaagatcgtccacaatgaccccgagggcgcttactacgtgatgctcgacatctcggagttcggctacgagagcgatcttcaattctgcgaggaccttgcaagcaaggtcggcgtgggcgcggtgccgggctcgagcttcttccgcgagccggtcaaccacctcatccgcctgcacttcgccaagaaggacgaaacgctcaccgacgcgctgaaccgtctcgaatccctgcgcgaaaagatccctgccaagggttaagaaaggaaattcgccatgaacgccctgagagaagagtgccggcagcttcgcgacgagctcatcgcgctgcgtcgggaattccaccgcgatcccgagctcggcctgcacgaataccacactgccgcgcgcatcgagcgcgagcttgacaggtgcggcatcccgcacgagcgcgtcggcgagaccgccgttgtcggccatttgaccggcaacggcaatggaagcggccttgtcgtgctgcgcgcggatatcgacgccttacccattcaggagacgaacgacgtgccctaccgctcgcaaacgccgggcatgatgcacgcctgcggccacgacgcgcacacgacgtgtcttctcggcgcggcaaaggttttgagcgcacaccgcgcgggctttggcggcgaggtgcgctttctcttccagcccgccgaggagatcggtcagggcgcaaggccgctcatcgccgcgggcatgctggatggcgcacagcgcgtcttcgggctgcacacggcgtccgaccttcccgcggggaccgtcggcgtcaagccgagggccaacaacgcgggtgtcgaccactttatcatccgcatccacggcaaaagcgcgcacgtctccacgccgcagctcggcgtggacgcgctctatatcgcaagtgagctcgtcgtcgcgctccagtccatcgtcacgcgcatgacctcgccggtcgagccgctgctcatcggcgtgggcaagctgaacgccggcacggcctacaacgccgtggccgagaccgccgtgctcgagggcacgacgcgcatgttctcgcccgagagccgcgcgcaccttcgcgaaacgatcaacgccgcggccgcacacatctccgccctttacggcggcacggcagaggtcgaatgggacgacttcgccacgccgctcacgaacgacgccggtgtgtgcggggaggtcgagcgcgtcgccgacgcgctcggcatccccacgacggcaaaccgcgcgctgtcgctcagcggggacgatttcgccgagtatctgctgcaaacgaagggcgcttacgcctacctcggcacggcaaaccccaaaaagccgcgcacctgcatctccaaccaccgcggtgatttcgacatcgacgaggaaacgctccccctcggcgcggcgctctacgcggcatacgcgctgtccgtccttgatccgcagtttgccaaataattgtttttttcgatgaaatcgccttagtcgtgtgcaaatttcgattttactttttgcgttattctatttaaaatataatcctcgccactgttaccgcagcggcggggatttctttagcaaatttggaaaagaggttaattatgaaaaagctgttttctctgttgctttgcgtcgtgatggtgctctctctggtcgcctgcggctcgaagactgatgacgcgcagacgcccgacgagcctcaggacaccgctcccgagctctccggcacgatgaaggtcgtcgccaccggcgacgtctacggtcccctgttcgacgcgttcactgccgacaccggcgtggaggtcgaatgcctgtccatgtcctccggcgaggtgctctccaagctccgcgccgagggcggcaccccgtccgctgacctgtggttcggcggcggcatcgacgcgttcatgagtgccaaggacgacggcctgcttgagcccgtcacctttgacgcggccgccgagctcggcgacgagtacaaggataccgagggttactggtattccaagggcatcaccattgtcggcttcctgctcaacaactctctcatggaggagctgggtctgaccgctcccgagagctgggatgacctgactgacagccagtatgaaggcgagatcgtcatgtccaaccctgccgtttccggcaccaactacgccgtggtcaacgcgctgctgcaggccaagggcgatcagggctgggagtacttcgaggctctgaacaacaacattgcctactatggcaagcgcggctccgacccgaagaacaaggtctcttccggtgagttcgctatcggcatctcctacatcgacgccagcatcgagcaggccgccgaggagaacgacctgaccatcgtttacccctccgacggtatgccctgggtccccgagggtgtggccgtgttcaagaacgctgaaaacgttgacgccgccaagtacttcgtcgagtggctcttcagcagcgacgatcatctccgtcagctcgccgagatcgagcagaagaacggcatcaaggtcatcaagccctccatcgaaggcattgagctgtcctatgatcctacgctcctcatgacggaggacctgtccctgttcggttcccagcgcaccgagatcctcgaccgctttgagcccctgatgggcgacaaggccgccacggaataaatgaagtccgccggcgctatccaaaaaaatacagaaaaaagggcatctcacgatgtccttttttccctatgtgaaaatgcggccgacaagctgatcttacttgtcctgctcgggagcgtgctgctgttcattctctggcccatcgcgtgcatcgcgctgcggagcctgcgcggcgcggacggcggcgtgggctttgcaatgtttggcactgttctgcgccagtacggcgaaagcctgcgcaacagcgtatttgtcggcgtttttacggcggtgctgtccactatcctctcgctctcagcggcgctcgtatgcgccacggcgcgcgggtggaagaagactctctgcatggtcatcatgctcgtcgccatggtgtcgccgccgtttgtctcgtcgcttgcctacatccagctctacgggcggcgcgggtggatcacctaccgcctgctgcacctgagcctgaacccctacaatcgctggggcgtcatcctgatgcagtcgatctcgttcgtgccgctcaacgcaatgtttctctccggcatcctcgaaaagctggacgagggcagccttcgctcggcgcgcgacctcggcgcatcgggcggagccatcctgcgcgatattgtcctgccgctcatccggcccgcgacgctcgtgtgcctgctgctctcgttcgtccgctcgctcgcggacttcggcacgcccatcatcatcggcgggcgcttcagcacgctggccgcggacatctatttgcaagtcgttggatactcggaccttgaaaagtcctcggcgatgaacatgttcctcctcatcccgtccattgtgttctttttcgtctaccgcgcgctgatgcgccgctcagacaagctgaccgacgccagccgcaccgctcagacggagctcggtctttcgctgccgcactgcggcgcaatgggctggggcatgattgcgctgagcactgtcttcttcgtgatgatcgtgctgcaatacggctgtgtgttcctctcgggctttttgaagagcacgaagggcgtctactccttcacgctgcaatactgggatcagctctggcgcatcggctcgtcgacgatgctgcgaagcgttgaatacgcgctcatcgtctccatcgccggcacggtttttgcgatgctcttcgcctattacatggaccgccgacgcatcatcggccgcagccttttcgactgccttgcgacgctgccctatatgctgccgggcacgtgctttggcatcggctacattctcgcgttcaaccacgcgccactcaagctgacgggcacagccctcatcgtgctggccaacatgctcttcaagcagctgccgacctccacgaagatctgcaccgcgtcgctcgcgctccttcctgaagtgcaggagcgctcggcgcgcgaccttggcgcggggcggctcgctgtgctgcgcgatgtggtctttcccgcactgcggcccgcgttcttgagctgctttgtctataacttcacgagcagcatgacgacggcgggctccatcatctttctcatcgacgccaagcgtcagctggccgtcttcaagctcttcgacgcggtatatcagggcgattacgccctcgcctcgctgatcgcgagcgtcatcaccgtcattgtccttcttgttgaaggcctcgccttcctcatcacccggaaaggagaaaatcgccgtgtatctcgaacttgaccgcttgagcaagcagtttgacggcaaatacgccgtgcatgacctctccctcggcctggaagagggcggacttttgtgcattctcggctcgtcgggctgcggcaagacgaccacgctcaacatgatcggcggctttctcaagcccgacggcggcagagtgctcctcgacggacaggacatcaccgcgctcccgcccgagcggcggccggtttcgaccgttttccagtcctacggcctgtttccgcacatgagtgtgctgcaaaacgtgacctacggactcaaattccgcggctattcccgcgcggaggcaaaggaaaagggccgccggtacctgagtctcgtcggccttgccgagcgcgaggacgcgcgcatcggcgagctctcgggcggccagcagcagcgcgtggcgcttgcccgcgcgctcatcgtcgagccaaagctctgcctgcttgacgagccgctctcgaacctcgacgcggcgctgcgcgtgcggatgcgcggcgagctcaagcgcctgcagcgcgagcttggcaccacgatggtcttcgtcacacacgatcaggaggaggcgctcattctggctgactccatcgccgtgatgagcgagggcgagctcttgcagctcggctcggcagaggaggtcttccgccatcctgcaaacgactatatcgcgtcatttctcggcctcaacgacattgtgtggaaggacgacggcagcgtgctgaaggtcatccgccacggagaaaaggggtaacaccgccatgcttgttgatatgcacctgcacgaatgcacctactcgaccgacagctttctccatctggaagagatcgtctccatcgccaggcaaaaggggctggacgcgatctgcatcacggaccacgacagcatgggcctgcgcgagcgcgcggaggcctattcccgcgagatcggctattccatcttcgtcggcgtggaatttttctcgctctggggcgatatcaccgcctggggcatcgacggcatccccgaccaccgcgtcagtgcacaggactttatcgacctggtgcgcgaaaaggacggcttctgcgtctcctgccaccccttccgcaacaacaatcgcgggctgcgcgagcacctgcgcgatgtgcacggccttgacggcgtggaggtcctcaacggcagcacgccgcttgaagagaaccggacggcactgcgcttctgccgcgagctggggctcaaggccatcggcgcgagcgacgcgcacgtgccggagcaggtgggaaaatacgtgacgtggctgcccgaaacggtcacaacgctgcccgattttgtcaccgcgctgcacacgctggaaacgcgtcccgccatctggacgggcagcgggtacgatgtcgtcaccgagttttgagatgaattttcagcgggctggggtatcatgccccggccccttctttacattccgccgtgtcatatccgatattcatgcaggaaagctgtggtaatatttcacaagaacccattcttccgtgtaaaaagattctcaaaatttggagaagtggaaaattagggattgacattttcccagcatgggagtatggtaacgccaacaatttcaaacgcccgatcgcgaggtcgggaagatagaggcgcggctgacaaaagtagcgcgttcgcaccggcacaggaagccggagcgcgcgaaaggggatgccgccgaagtggaaacggttcctgtgccgtttgccgctggttcgtcggagaacatccgccggactgtcacgtatgtggagcgctatcgaggtcggcaagctgtttatctcccccaaggtgatgaccggtttgccggattgcagtacagttgcagccgtaaatgcttcacaaagcatttacggctttgttttttgtctgcatcgggagtgcgctgaaggcgtagaaagcaggactcccctgtttttgaaaaaatcaaactcatcacaagaaaggaaaccaccaccatgaagctcagaacctttaccgccctcctgctggcggccatcatgctcttcgcgctcaccgcctgcggcagtcaggccgccgatgacagcagcaatgatcagcagcaggagcagcaggacaccaccacaaacgaaagcaatgaattccgcgtcggcatggagtgcgcttacgcccccaacaactggcaggaaagcgaagcgacggactcgaacgtccccgttgaaaacgtcgccggcgcgtatgccgagggttacgacgtgcagatcgccaaggccatcgcagagggcctcggcaaggagctcgtcattgtcaagctcagctgggacggcctgatcgacgcgctcaatcagggccagatcgatgccatcatcgccggtatgatggacaccgccgagcgccgcgaatccatcaacttctccgagccctaccgtgagaccacctacggcctgatggtactcgccgattccccgtacttaaatgccacctccattcaggacttctccggcgcggccgtcctcggccagcagggcacggcgcttgacgatgtcatcgagcagatcgaaggcgtcgaccacctgagccccgtcggcagcgtgcccgacatgatctcccgcctgcagcagggcacctgcgacgccatcgtcatcaacgttgagaacgcgcagggctacctcgcttccaacccgaacttccgcctggtcaccttcgatgagggcagcggcttcacgctgccggccaagggctcctgcgtgggtctgcgcaagagcgacaatgaactccttgatcagatcaacaccatcctctccggcatcgacgacgacgcccgcgccgccatgtggcaggcagccgtcgacggccagccccagtaatcgcccacgcaccgccgccgcgtttttcacgcggcggcgggtacgcgaagcactcaaagaaaaatcaggcgcttcgcatcataaaggaggaaacaccatggcagcatccaccgcgccccggaagaacttcatcacccgggatcaccgttacgtttatttaggcggcagcctcatcgccctgctgggtctcggcatgttctactccgctcccagcccgtacagcttcatccccgcgcagtccgtgttcggcacggcgctcgcggtgatctgctggtttttcctcggcgtgagcgccatggcgctgctcgtcaagtgggcctattggaacaattacagctccactattatgaagcgccccctcatcgtgcgcgtcagccgttacctctcgtatctcgacgccgcggcctgcgcgctgctggtgctcgaccgcttcatcttaaagctcgcctacatcatcaacgccgccatccatgccgacagcaacccgaccgacacgctctccaccatggcctacatggcgtacaaccagcgttcgctcttcgccattggcatttcgtacacggtgcgcctcgcgctcttcggcacggcgatcgcgttcgtgctggcgcttctcatggtcttcctccgcattcaggagcccgacaaacgcgacaacgactttgtgaagttcctcaagatcgttgccaacaagttctcccgcttctacatcttcgtcatccgcggcacgccaatgatggtgcagtcgctcatcctctataacgccgtgttcggccttttcaagcgcacgggcatgagcgtttcggacatcaaccgcgtctggccgctcttcttagcaggtcttgtcaccgtttccctcaactccacggcttacctcgccgaggtcctgcgcggcggcatcctcgccgtggacgcgggccagatggaggccgcgcgctcgctcggcatgacgcactggcaggccatgcgcaaggtcgtcttcccgcaggccatcaagaactcgcttcccgccatcggcaacgaattcatcatcaacatcaaggattcgtccgttctctgcgtcgtcggcgtgtccgatctgatgttcatgacccgctcggtcgccggtatttattataaaggtaccgagtgctacctcatcgctgccatcgtttacctgttcctgacgtatctttcttcgctcctgctcaaggccatcacgggaaagatgaccgcgccggacaacaccaagcggcaccagggcaaccaaaccgtcgatctggggcttcccagctcgaactgacaggagggcgctatgacgaacgatcccatcatcaaaatcgaacaactcgaaaagtccttcggcgacctgcacgtgctcaagggcattgaccttgaggtcaaccgcggagaggtcgtgtgcatcatcggcgcatccggctccggcaaatcgacgctgctgcgctgcatcaacttactggaagaggccgactcgggccacatctggttcgacgggcaggatttaatggacttaaaggtcaacctgaacgccctgcgccagaagatcggcatggtgttccagggcttcaacctcttcaacaacaagtccgtgctcgacaactgcactctcgctcccatggacgtcaagcacatccccaagacgcaggccgaggccacggccatcaagcacttaacgaccgttggccttgccgacttcatccacgccgactcccgccgcctctccggcgggcagaagcagcgtgtcgccatcgcgcgggcgctgtgcatggaaccggagatcatgctcttcgacgagccgacctccgcgctcgaccctgagatcgtcggcgaggtgctggacgtcatgaaaaacctcgcccagcagggcatgacgatggtcgtcgtcacgcacgagatggcgtttgccaaggaagtgagcgaccgcgtcgtcttcatggatcagggggttatcttagagcagggctcgcccaaggaggtcttcggtaaccccaaggagccgcgcacgcgtgagtttctcagccgctatctggaggataaaatggcatgatacagaaaaaagtgaccgatttttttgccctggagggcaattatcccgacttggacggcgagggcgcggccgcgcgcctgtccgccgccatccggtgcaagaccatcaactactttgaccacagccggacggactacacggagttcgacaagctgcacgcgcacatcaaggcaagctaccccaacatcatgcgcgtgggtacgtttgagcgcatcggccaccacgccgtactcatcaccatccccggcagcgacgcttctctgcgcccctgcctctacatgtcgcatcaggacgtcgttcccgttgttgagggcacagagcaggactggacgcatcccgccttttccggcgacatcgcggacggctacatttgggggcgcggcacgcttgacatcaaagagcaggtcttcggcgtgctggaggccgcggaatatctgctcgcccacggcaaatcctttgcccgcacggcgtatctcgccttcggcgacgacgaggagaccatcaacttaggcgcgctcgccatcgccgagcatttgaaggcgcagggcgtgacgctcgaattcgttcttgacgagggcggctgcaaaattgagcccggcacggccttcggcgcgccggagacggccatcggcagcgtgcagctgatggaaaagggctacgccgacttggagctctgcgtccacagcatcggcgggcattcgagccgtccgttcggcggcacgtcgctcgggcgtctctccggcgcgatcgccgacatcacgcgcgcgccgttttccgtgcacctcaacagtgccatgaccggcgcgtttgaaaccctcgctccctacatcaccgaggagccgctcaagactcttgtgcaggatgttgcgggcaacgcggacgccatcgcggcctgctgcatgggctcgcccgacctcttcccgtttgtcaccaccaccatcgcgcccacgatgatccacggcggcagcgccgcgtgcaatgtgatgccgcaggacatgaccgcggtcatcaacttccgcttggcggacggagacacggtcgagagcgtcatggcccactgctgtgaggccgtacaggacaaaggcgtcgagatgcgctttttgcaagcgaacgacccctccgccatcgcaaagcgcgacggctacggctatcgcagggtcgtcgagagcatgcagcgctactttccggacgtcgtgttcatcccgtcgatgaccgcgggcgcgacggacgcgcaccgctatgaggagatctgcgacacgtgcctgcggtgcagcccgtttatgaccgagcccgcggaggccgcctccggcgtgcacggaacgaacgagcgtcttctcgtccgctcgtatttgcagggcatccgcgtactcatcgacctgatggagcacgccaacgtggaaccgtgaatttcctttcttttcaatgaaaaagccggagcagctcaggctgctccggcttttctttcctgttcagttctcgcccatcgtgtagaccatgtcccagaagcgcaggtcaaaaaggcagcaattttcgaagatctcgcagagccgctgcgccttcttttcgtcgatcacttcggcgagcgcgtcgatccggtcgatcaatgcctgattcgtctgccggtactcctcggaaacgtagcccgcgaaccacgcgccgtagttctcatcgtgcagggcgcttgggtagcgctccaccatctgctcggcaatatacgcatagctccacgagcagttcaaaagcgtcacgagccccgtcagcacatcccccgcctgcgcctcgcagagcatgtaatggctgtaggcgctgttgtcgatgtgcgggcgcgcatcggcaatctcctcctccgtgacgccgaggcgcttcatgtacggaagatgcgtgcggaacgtctcgtcgatcgtgttcgccatctccccgctcaaaaagcggatctgctcgaagtcgtcggttttctgaaggatcgccgcaaaaattttcacgtaatcccgcaggtacagataatcctgcaccatataatagcggaacttttccttcggcagcgtgccgtccgccatctccgtcacaaacggatgggtcagataccgcggccagagcgcctttgcccgctcgtagatcctctcggagagcttcacgccgttctccccgctcatttgtgggcgatgagcgcgacgtaaccgccgctctgatagccggggacgacgtcctccacgctctcgttggtgtacatggggttcttcaagagcgtttggtagaagtcaaaatcgtggaagccgagcgatttgagcgcgtcgaccttttcctcggtcgagtgccacacgcccgcgcagcacagctcgagcggatacggcagcttgggcatgacgccgcgcagggacgggtggtcgaacgtgccaacggccttggcgagaaggtacatgaagccgaacgcgctctccttgggcacatccagcgaaatgaacttgccgttcggcttgagcgcctttttgcacacgtcgaatgcgcgcgtcaggtcctccatatagctggagctgccgttcaaatagatgatgtcgtaggcgttctcctcaagctcgacctcctcgatcgcgccgaaggcgatgacgttgatgccgcgcttctgcgcgatcgcgcccatgtcgcgcgagggctcaacgccctcgatgttcttgcagtcgatcatactctcgaacaggccgctgccgcagccgacggagagcacgcgcttgcccgaaatatcgccgagcgccttttcaaacaggcggaattcgctctggaacacgttttcgttttccataaaccaggcgtcgtactgcgccgcgtagccatcaaatttgggtttcatcgtcaagtaatcctttctgttttgtcaattttcaaggtcccgcccgccgtttccgcttccctattatcctgtgccgcaggatgcgggaaaacaggccgggcctgtgcctttttgatgaatcataacacaatcagctccctaccgcaacggtatgtttgcggtaaatatccatcaccttttgcccgcgtacacggcagttatagagttcgtgtcacccaatagattgaatcggcaatgagaaaaagatggattccggttgcaattcacagatgggaggaatgtatatggaaggcttcattacaaatgttctcaatttataaagggtacgataaagggtaaaagatgcttcagggcagcaaaaaagccttgaaactactgagtttcaaggctttttccgtggtgcgcggtataggactcgaacctatgaccccatgcacgtcaagcatgtgctctaccagctgagctaaccgcgcgaatcgaacagtgatatactactatatccgcattcttttgtcaacaccttttttcaaaaagtgcggattttttctcccccccgtgaagagactgtttatagcatacgctaagagctcgctgatgtaaagaggggaaaatagcagaaattcgccgccgtttttcatctatttttctgcgggcacatttcttgtcaagccgccgtacgttctatataataggcatatattgtgtaaattgaaaatggggtgctttttacgatgggacaaatcggttttgataacgacaaataccttgccatgcagtccgcgcacatccgcgagcgcatcagcaagttcggcggcaagctgtacctggagttcggcggcaagctctttgacgattttcacgcctcgcgcgtgctgcccggcttccagcccgacagcaagatccgcatgcttcagcagttgcgcgacgacgcggagatcgtcatcgcggtcaacgcgaacgacattgagaaaaacaaggtgcgcggcgacctcggcatcacctatgatgacgactgcctgcgcctgattgacgcgttccgctcgctggggctttatgtcggcggcgtgtgcatcacgcagtacgcggggcagaacgcagcggatgccttcatcaagcgtctcaacacgcttggcgttcgcaactaccgccactaccccatcgcgggctacccctccgatgttgcccacatcgtgagcgacgagggctttggccgcaacgagtatatcgagacgacgcactcgctcatcgtcgtcaccgcgccgggccccggcagcggcaagatggcgacgtgcctctcccagctctaccacgagcacaaacacggcgtaagcgcgggctacgccaagtttgagaccttccccatctggaacctgccgctcaagcaccccgtgaacctcgcctacgaggccgcgaccgcggaccttgacgacgtgaacatgatcgacccgttccacctcgaggcctacggcgagacgaccgtcaactacaaccgcgacgtggagatcttccccgtcctgcgcgcgatcttcgagcgcatctccggcaagtgcccctaccagtcccccaccgacacgggcgtcaacatggcgggcaactgcatcatcgacgatgaggtctgccgtcaggcctcgcgcatggaaattctgcgccgctactacaccgcgcaggtcgacgtcgcgcgcggcattgctgacgcctgccagctcagaaagctcgagctcgtcatgcagcaggcggatgtgacgcccgacctctgccccgctgtggccgcggccaagcagaaagccgaggagaccggcgcgcccgcgggcgcgatggtgctgcccgacggccgcgttgtcacgggcaagacctcttccctgctcggcgcttcggcggcgctgctgctcaacgcgctcaaggccatggcgggcatccgcagcgacatgaacctcatctcgaatcaggtcattgagccgatctcagcgctcaagatccagtcgctcggccaccacaacccgcgcctgcactctgacgaggtgctcatcgcgctggcgatctcggcgctgacgaaccccctcgccgacatggcaagagcccagctcggcacgctgcgcggctgcgacgcgcacttctctgtcatcatctcggaggaggacatcaagctctacaagcgcctcggcattcacgtcagctgcgagccgaagtatgaatccaagcgtctttatcacaaataattcggagaaagcaacatcatgtctaacgaaaagaatcttccctacgccgtcgtctgcggcggcgtgaatatcgacatcggcgcgcactccttcgcgccgctgcgcgcgaaggactcgaaccccggcaaggtcgagctgagcctcggcggcgtgggacgcaacatcgcgcacaacatgcgcctgctcggcgtaccgacatatcttctgaccgccgtgggcggcgattcgcgcgcaagccaggtcgaagagaactgcaaatcgctcggcattgacctttcgcacgcgctgcgcgtgcccgacggccgcacctcgacctacgtctttgtcggcgacagcgacggcgacatggccgtggccgtatctgacatggagatctgcgaaaagctgacgccggactactttgcctcccagaaagcgctgctcgacggcgctgccgcggtggtcgtggacgcgaacctgccgcgcgaatccatcgcttatcttgtcgggcactgcaccgcgccgctttttgtcgatccggtgtccaccgtcaaggcggaaaagcttcagggcttactcagtcacgtccacacgctcaagcccaaccgcatcgaagcagaacttctatcgggcgtgacgatcacggatgacgcatcgcttcatcaggcagcgcaggcgctgctcgatcagggcgtgcagcgcgtgttcctctcccttggcgagggcggcgtgtttgccgcacagcagggcgagacgcatttggagcccatctgcaaagccgagatgcgcaacgccaccggcgcgggcgacgcgatgatggcgtccctcgtctggtcgttcctcgcgggccgcgaccttgccaaaagctgcgccgccggtacggctgccgcggccatcgcagtcgagagcgaagagaccatcaatccgaacatgagcgccgaggccgttctgtcccgcgccgcgaagtaactttctacgacaaaaaagaaccgcccgatcgggcggttcttttttgcttattttctcagatccagcagcattgcgacgtggcgatagaggctcctcttgaccgcgggggtcatgcaggcctccttgatgggcatggcaagctttctgagctcgtcctcggcctgcgcgatgacctcgtcatccgtggcgtcggagtcgatctttgccgctgtctcggccatcacgaccggatggggcgcgaccgcgcccgcggccagacgcacggggcgattgccgccgcagcggagcgcgaagttgatgatcgggaagtcgatcgtcgtgcgcatcgcgtacttataaaagccgctgcgctcgccttcctccgccgcggggacgaagaagcgcgtgacgaggatgggcaaatgctcgtggcaggcaaggccgttggccacgctgtggcgctcgatgagggacttgaggtccgtgcggtgcgtctcgccgtcttcgatgtactcgacctccgcctcgtaagcgatgagcgcggtggcgacatcggaatagtagattgcgcggcagaccggcgagttcgggatctgatggcaaatgctgccgccggtcttgaagcagtaggcaagaccgctgcgccacaggtgcggctggttgaagtaaatgcagcggcggtcctgcatgatgttgccgccgacggtggcgatgtttctgatctgcggggatgccgtcagcgatgccgcctgcgcgatggccgcatagcggctgttcaaaagcgcgctctcggcaagctcggtgagcgtcatcgccgcgccaataatgagctcgccgtccttttcctccaaaacgtgcagctccggaattttcttcaggaagacgaggtccctgtcgtcgcgcacctcgttttttagcagcggcatgatgtccgtgccgccgccgatgtaggtcgggtgctcggcggagacgacgtcgtgtaagctcgataaaacctgtccgctcatttcacattccccctctcggtcggcaggatggcaaatctgtcgcacagcggcaggctgttgatctcaacgccgcttgcccggcgcaccgcgttcacgatggccggcgccacgggcaccgtggcgagctcgccgacgctcttcgcgccgtgcgggccgtaggggtcgtggctcgagaccatgtcgacatacgtgcgcggcatgtcgcccatctgcgggatgcggtagtgcagaaaatcggtcgacagcgtgcggcgcgagcgcgggttgatctccatgcgctcatagagcgcgtagcccacgccctgcgcgatgccgccttcaagctggccggcaacggtcaggcggttgatgggcgtaccgacatccacgacctcgatgatgtccatgaggcggatggcgttgagcttcttgtggtattcagccttgacaaagcagacggagaacgggttggggcaggccaaagccttgtaggtacccgcgccgatgggcacgctgcccttggggtcgaacaggatcttgcgcgcggcgtcttcaaagctcagttcgagctcctcgccgccgctgatatagtagcggtggtccttttccttgaccgtgcagccgtcgtagatgaccttgagctgctcgaccatcttctttttcagatcgtcgcaggcgagcttgacggcgttgccgcagataaacgtctggctcgagccgaacgtgccggtattatacggcgtcagacccgtgtccgccgcggtgatctgcacgctggagagcgggataccgaggcattccgccgcgatctggctctccatcgtctcgctgccctgaccgatatcggcagagccgacgagaagatgcacggacgcatcggcattgagcataacgaccgcgccgctcaggccctccttcgaggacgggccggagccgtggcagctgaaggaaatgccccaggcctgacggatgttttcatcgtcgatcagaggttctttctcgtcgatctccttctggatctgctggcagcggcgcgcgcagtcctcaatgccgttgctgctgacggggatgctcgcgcaggggaagcactcgcccacctgcacgtggttcatcaggcggaattcgacggggtccatatcgagcttctgcgcgaggcggtccatcagaatttcgcgaccgaacgtgagctgcgtgttgccgtagccgcggaacgcgccgcccgtcacgtggttcgtgataacgctcaggccgatgaacgagtagttcggcacgttgtactgcaatttacgcgcggcggcggccacgaccgtcggcgtgtgcgtcgtgtaggggccggcattcagacggaacgtcgtgtcaaagagctgcagcttgccgtttttgtccgcgccgatgcgaagatcaacgtcggaggcgtggcgcacgacggagtagaagtcctcctcgcgcgaatagagcagcttcacggggcgcttgatcttgcgggagatgagcgccgcggcgtgctgggcgtgcagctgctgacgcgcgccgaagcccgcaccgacaagcggcttgatgatgtgcacgtccacttccttgaggccgaaaagctcggccagaatgcggcgttcctggaacaccgtctgcgagcagctgtagatcgtcatatgcgcgccgtcgctgaagtcgcagatgcagcaggtcagctcgatcatcgtgtgctgcatcggcggcgtgacgaagtggtcttcgagaatgatgtcggacttttcctcgcccacagcgatgtcgccctgcgacaccttgcgccgctggacaacgttcgtgtcggaaagatgcggctgcatcgcgggcgcgttgtcggcgagcgcggccttgacgtcaaggatcggcgcaaggttctcatattcgaccttcaccgcctcggcggcggcgcgggccgcctcctccgtctccgcggcgacgacggccacacggtcaccgatggtcagcggctcgtccgtcagcaccttctcatccgccatcagcagcggagagggcgggttgcccgagcagttgaagtaggcctgcggggcctcctccggcagggcgcaaccaagaaaaccgggaaccttttccgcctcgctcacatcgatgctcaaaaccttggcacgggaataagggcagcgcaccagcgcggcgtaggccatgttggggagctctaaatcgtcggtatacttgccgcgacccagcgccttatccatggactcaaggcgcggcgtagcgtggttgacaatgtcgaaatgatgctgctccatcactgctgtgtcccctttccgttcgcgtactgttcaatgaccttggaagccgcgacgacggcctcctcgatcttcgtgtagcccgtgcagcggcagaggttgccggacatggcggcgcggatctcctcgcgcgtgggatggggattgcggtcgagcagcgccttggccgccatgatcattccgggcgtgcagtagccgcactggatggcgccggcgtcgataaacgcctgctgcagcgggtgcggctcgtcggcggtgccgataccctcgatggtctcgaccgtgctgccgtccgcctcgatggcgaacacacagcacgagttgaccgcgcgcccgtccatgatgaccgtgcaggcgccgcattcaccaaggtcacagcccttcttcgcgcccgtcaggtgcgcgcgctcgcgcagcacgtgcagaagcgtctcctgcggctccaccgtgaacgcgcggctctcaccgttgagcgtcaggtggatcgtgtggttgttttcaagcatgacatctatctcctgtgcagaatttgctgtatgttccgtatcggcccgtttccgccgctctgtgcgctgcggcaggtctctcactcaccggagaacgggcgtctcatatcctctttttcgcccgcgggcatattctttcccgcgcgggcgcgacggccctcgagagccctttttttggtacgggcaacagtatactatctattttgcacaaaatcaagcgtttaaattacgtcgaattcattcaacttttgtatattatgtctcaaagcggttatcaatgctttttccaacgctcgaacggggcgtcccccctcgtctttccccacatcaaaaaaaggcacggggcagcgaaggctgtcccgtgcctttttccctttttgcgcaaaaaacgggccgctgaggtatcagcggcccgcccttcgccttttcacttttcaatgagatagctgccgctgtccgtcgcctccgtcacgatggggacgaactcgacgtcgtaggccttcatcgcctcggtgacgctctcgagctggtctgccgtgaccttgacgtacacgcggtcgaacttttccgtgagctcgctcatcacgatgccggacttctcttcgctgcccgcaagcgcgatgtctgcgtccacgcagacggagagctttcccttgtagcccgcctgctcaagcgccgtatgaatgtcgtcggcgagcagcgcaagcgcctcctgctgcgtcatcgtgcgctcgtccgtcttgatgcggctcatgcgcccctcgcgcgggtagtggaaatcgtcgagcagcagctcgtcaaagcccatcttgccgcattccgtgacgatatcgctcacatatgcccgcgcggcctgcttttcgggcgcgagccagtgcgtgctgttcgtatcgtaccagacaaagcccgtcagctggcacacggcggcgtccgtcatgtgcttgtaggcatacaggctgtcgtggagcgtgctgatgcgcccgatcgtgtaatagtccgagccgacaaggccctgaatggccgtgtccgatgtgctgttcccggccaccgcgccgcagtcgatcgcgccctgcactttggaattatagtagagcttgccgctcgcgtccttgagctcgaccgccacggcgttcacgtccttatcaaggccatcgagcgctgcctgccaatcgctgccgagcgcgtccgcgcccagctcgaccgcgtaggtatccttgatgacgggcttttgcaccgtgatctcaaggtcgtcctgcttcttatcgtcgccgctgtcgccgccgtttgcggtatcgtcctgcgaggccttctttatccacgggaactcaaagcggaccgagccgtccgcatcgtataccatatagcgctgcgcaaacaaaaagccgcacgccaacagcaaaatgaccaccagcaccacggccagcacgcctctgccgcgcctgcgcccgcgataaccggtatagcccttcgttccgctcgttcttcttgccattgtctgcatccgcctcctttttctcgtgcaacagtttaccttttaagagcaaaaaaatcaacaaaaacctttcggtttttgttgattttccgcttttgtatgctttagccctcgatagcgtccatcagcgcgacgcggcgggcgtggcggccgccttcaaacgcggtggagaggaacgtctcgaccatggccgcggccagcttcgggcctgtgaagcccgcaccgatggccatcatgttggcgttgttgtgctggcggcagagctgcgcctcgagcgcatcggcgcagtgcgcgcagcggatgcccttgaccttgttcgccgcgatagagataccgatgcccgttgtgcacacgacgatgccgtactcgcactctccgctcgcgacggcacgcgcggcggcctcgccgaaaatgggatagtcgcagctctcggtggagtaagtgccgcagtccttgacctcgtggcccaggccctccagctgctttttgatgtcttccttcatggcgtatccgccgtggtcacagcccaatgcgatcttcataatgtttctccttttgtcggtcagattttgtgaaagaccggttttttcttttcaaacgtgcacacatagttgaggccgcagctcttgagcagttcctgcgtctcgcgggcgcacatgccgacgaattccggcgtgtgcgcgtcggtgccgatggtgatgatctcaccgccgagctcgtgatagagcctcagccatttggcgtccggcagcggcgtgttgccgcggttcacgttgcactcgatgccgcagccgttttcaatgagcgcgcgaaacacctgcgccacctcgtcctcaaaaccgtcgaaactcatgtgcataccgtggttttcgttcatgtagcgaagcggcagcgtcaggtggccgagcacagagaactttccccacttggccgtttccagcacgagcgtcaggtagtccgcaatctgctcgcgcgcctcctgctccgtggcctcgggcatgaagtagaggtcattccaatcgtacttttccgacagctgatgctgcgagccgatgacaaagtcgagctccggcaaacgcgagagcagctcgtctgcgtaggcaaagtcgcgcatcgcctcgccgagctcgacgccgcggcggacgatgatcttcccgtccgccgcctggtcggcgcgcgcaaaggtctcttcacgattcgaaaaatcgtgttcccagtgtgccgtctccctcgggcggaacaggtctacatggtcggtcaggcacatttcctgcaaaccttgcgcgatgcctgcgcgcaccatgtcttccaccggcgttttcgagtcgaacgaaagcgaacagtgggtgtgataatcggataaatacatcttctattcgttacagcttgaactttccgaaaaagctcttgtgttcctcataattcttctcgccgagcgactcgctgaacttcttgagcgcttccttctgctcgcggttcaggttgcgcggcgtctcgatatacacggtgacgtactggtcgccgcggccgcggccgttgaggccggggatgcccttgcccttcaggcggaacgttgtgccgctctgcgtcccctcggggatggtgtacttcaccttgccgtcgatcgtcgggatctcaagctccgcgccgagcaccgcctgcgtgaacgtgatgggcgcttcgcacaggacgctcgtgccctcgcggcggaagatctcgtgcggacgcacggacacaacgatcagaaggtcgcccgcggggccgccgttcttgcccgcgttgccctgcgcgcgcagcgaaatggtctgcccgttgtcgatgcccgcaggaatgctgaccttgatggtcttgcggtggcggatcatgcccttgccgccgcacttggggcagggctgatgaatgatcttacccttgcctccgcagcgctggcagggtgccgacgtcgacatatagcccagcggcgtctggcggcgctgctggatcacgccgctgccgcggcagtcaggacatacctcggcggtcgtgcccttggcgcagcccgagccgcggcagtcaggacactgctcgatgcggtcgatgctgacttccttctcgcagccgaaggccgcctcttcaaagctgatgttcacgctcgtgcgcaggctttcgccgcgctggggcgcgttggggttcgcgcgcgcgccgccgaagccaccgccgaagaagctgccgaagatatcgccgaggtcgccgaagtcgaacccgcccgcgccgtaagcgccgccaccggcgcctgcgccgtaattcgggtcaacgcccgcaaagccgaactggtcgtagcgcgccttcttgtctgggtcgctcaaaacctcgttcgcctcgttgatctccttgaacttctcctcggcttccttgtcgccggggttcatgtcgggatgatacttgcgcgcgagctttttgtatgcttttttgatctcttcttccgaagcgcccttggaaacgccgagcacctcgtaatagtctcttttattttcagccatagactacgctcctaaaaacgccgcaatcgggggcagtataaactgtccccgctgcgtcgatcggtttcaaattacttcttgttgttctcgtcgtcatccacgaccttgtagtcagcatcataatactgctgaccgttcgggccggtctgcgcaccgccgttctggccgcccatgtcggggccagcctgtgcgccgccctgcgggttcgcctgctgatagagcttctcgctcatctggtagaacatctgcgtgagctcttcggtcgcgctcttgatggcgtcggtatcgtcgcccttgaggacttccttcagcttgtcgataccactctggaccttggccttctcgtccgcggggatcttgtcgcccacttcgccgagggtcttctcgctctggtagaccatctggtcggcctggttgcggacttcgaccttttccttgatcttggcgtcctcagcggcatactgctcggcgtccttgacggccttttcgatatcttccttgctcatgttggaggaagaggtgatggtgatgtgctgctcggtgccggtgccgaggtccttcgcgctgacgttcacgatgccgttggcgtcgatatcgaacgtgacctcgatctgaggcacgccgcggcgggccggagcgataccatcgaggtggaagcggccaaggctcttgttggcagcggccatctcacgctcgccctgcaggacgttgacctcaacgctcgtctggttatcggcagcggtggagaagatctggctcttcttcacggggatggtggtgttgcggtcgatgagcttggtgcaaacgccgcccatggtctcaatgcccagggacagcggggtaacgtcgagcagcagcaggcccttgacatcgccggtcagaacgcccgcctgaagagcagcgcccatagcgacgcactcatcggggttgatgcccttgaagccttccttgccggtgagcttcttgaccatttcctgcacggcggggatacggctggagccgccgaccatcaggaccttgtggatgtcgttgccggtgaggcccgcatcgctgagtgcctgacggacagggccggcagtggcttcgaccaggtgcgcggtcagctcgttgaacttagcgcgcgtgagggtcaggtcgaggtgcttcgggccggtggcgtcggccgtgatatacgggaggttaatattggtagaggtcacgccggagagctcgatcttggccttttcggcagcttcttttaagcgctgcatggcgaccttgtcgctcgaaagatcaacgttgtcggtgcgcttgaactcgctgaccatccacttcatgatgcactcatcgaagtcgtcgccgccgaggcggttgttgcccgcggtggccaagacttcaataacgccgtcgtcgatatcaaggatggagacatcgaacgtgccgccgccaaggtcgtaaaccatgaccttctggctctgctccttgtcgacgccgtaggcgagggccgcggccgtcggctcgttgatgatacgcttgacctcgaggccggcgatcttaccggcgtccttggtcgcctgacgctgcgcatcggtgaagtaagcgggaacggtgatgacggcttcgctcacggggccgccgaggtaagcctcagcgtcgctcttgagcttctgcaggatcattgcgctgatctcctgcggggtgtacttcttgccgtcgacttcgactttataatcagaacccatttcgcgcttgatcgaagagatcgtgcggtcggggttggtgatggcctgacgctttgcgacctggccgaccatacgctcgccggtcttactgaacgcgacaacggacggggtggtgcggttgccttcggcgttggggatgacgacggcttcgccgccttccatcacggccacacaagagttggtagtaccaaggtcaataccgataactttagacataatgttgtcctcctaagatctatcttaatttttttgttaacgaaataaatttatcatttcgcgcttccgcgcggaatttgcactttaattggccacttttacaatggcaaatcgcagcaccttatcgcccagcgtgaagccctgctgaagcacctcgaccacggtgttttccccgtagttctcgtcttccacatgcatcacggcgttgtgcttttcggggtcaaagggctttccggcggcgtccatcgtttcaacgcccagctttttgaggctctctttgaactggttgaacaccatctcaaggcccttgcggtggggcgactcctcgtcgccatactgggcaaggccgcgctcgaggttatcgtaaacgcccagcagcgccttgatcgtgtcgatcttcgcgtcggcgtaaaggctttccttttccttcgcggtgcgcttgcggtagttgtcgtattcggcggcaaggcgcaggtatttgtcctgctcgtcggcaagcgacttggcaaggccttccatcttctccatctgctcgcgcgtgacggtgaaggtctcgggctccgcgctcttctcagcggccttatcagccttggcggtctctgcggtcttagccgcttcgtctgctgcgggctgctgcgccgtgttcttttccggcgtgctctccgccgcgttctgcttgtctttcctacccatttcttactccttatcttcttccttgggcggaagctcgttcttgccgaacatccgcgtcaggctgtctgcaaaataactcagccgcgccgtcacggtggcatagtccattctggtaggacccaccacaccgacgaggccgcgcatcccgtcgccgatatcgtagctggcgacgaccacgctcgtttccttgagcgcctcgttcacgttttccggcccgatcaggatcttgagcggcgcgccgtcatccggcacgggaagctcttccttgttatccacaaggaatgtcacgagatcgtgcgccttgtcgacatcgcggtactcaggcattttcaagatctggctcgcgcccgcggtctccacattgcgctgcgcgctctgctcgagcacaccgatcgcatattcgaccgctttggacactactagaaacagctccggcgaaagctgctcggaaaggctcatcagccttgcactcatctcatcggcgctccggccggtgaagtgcgtgttcaaaagctccttgacgtccgcaagccgctggctgtcgaacgggaggtccgagcgctggagctggctcttcacgcggttatcctcgcccatcaccacgacgatgaagctcatttcatcgaccgcgatgagctcgaagcgcttgacgctcgcctcgcgccgtccgcccgtcacgctgtacacggggtaattgacgatgctcgacaccatctgccccgccttggcgatcacgctatccgtgccgctgagcttggacttgagctgctcgttgatctcctccgcttctgtttcggagacctcgcgcttttccatcagctcgttgacgtacaagcggtaacctttcggcgacggcacgcgtccggcggacgtgtgcggctgctcaaggtagcccatttcgaccagatccgcaagctcgttgcggatggtcgcggagctcaccgaaccgcccatctcctcggccagcgccttggagccgaccggctcagccgcggcgatgtaatcctcgacaacgcgcttgagaatctgctttttgcgctcggtcaagtccatacgccgcgctcctttcgtagctttagcactcctttcctccgagtgctaaacgcagtgtaccaccgacatttcctattgtcaataggaggcagtgtaaacagtttgtgaactacgcaaaagtcaggccaaggcccgccttttgaagcattttcactccgctctgtgcctcgcctacggctcgacactcgctgcgcgagaagagttttttggcacgtacacgccccagggcggcttctcttgctgctctgcggcaattcactttctgtcgcgccaaaaaagatttaacattatttgccgccgtgcgcggcagtcctgggcagccgttggcagcttcgctgccttacggatgccgcgcaccccttgtgggtaaaagtctgcgacgcttttccatttcacggcagcttcgcagaattccgtgcccgcaggcacggaaaaaattaaaatcgtaaattccgacgacatgcgcgtcggaatttactctttgcgcggagcgcgtgtcgcagccgccctctgggcggcaaggcacgaagcggagtgtatctccctcaaaaagcggcgctgccgctttttgaagaataaaaaaagaggaacgctttcgcgttcctctttttttaagaacctttattcggccttgggcgcttcggcggctttcgcagcttcagcagccttggcttcggcggctgccttggcggcagcggccttgcgctcggcggcagccttctgcgcggccttgaacttctccttctcctcgggggtcgggatgggctcgatggcgttacgcgggcaggccttggcgcacatggtgcagtttttgcacttggtgtagtcgatgacggccacgttgttgacgacgtggatggcgtcgaacttacaggtgcgctcgcacataccgcaggcaatgcaggagttggcgcacaccttcgtgacggcagggcccttctccttgttcgagcagttgacgaagaccttctgcttgtagggcacctcgacgatcagcttgcgcgggcaggcctcgcggcaggcgccgcagttggtgcacttctccttgtcgacctcggcgacgccctgctcattgatatggatggcatcgaactggcaggcggcaacgcaggtgccaaagcccatgcagccaaaggagcaggcggtcgggccgccggcgaccttcgtcgcggcgacgcagtcgtgaagaccgacatactcgaaattcttcacagaggcctcgccgccgttgcacagcacgtgcgcgacctgcttttcgccgctgggcgcttccatgcccatgatctcagcgatcttggcagcgccttctgcgccagcgggcgcgcaggcggtgacgggagccttaccggcaagaattgcctcggcgcagcccgcgcagccgggatagccgcagccgccgcagtttgcgccggcgaggcaggcctggatcttgggcaggcgctcatcgaccttgacctcaaaggccttggccgcaacggacaggatcaggccgaacacgacggcgatcacgcccagcacgaggacagcgtaaataacgtttgtaatcataatttcgtcccctccttacatgggccacacctgcagacccgagaagcccataaatgcgagggcgatcaggcctgcggtgatcagcgcgatggggaagccttcaaatgccttgggatagtcggcaaattccaggcgctcgcgcaccgtggagaacaggtagatcgccagcaggaagccaaggccgccggtgatgccgtacaccacggattcgatgaagttgtagtcgttctgcacgttgagcagcaccacgccgagaacggcgcagttggtggtgatcagcggcaggtacacgccgagggccgtgtagagcgtcggcatggactttttgaggaacatctcaatgaactgcacaaggctcgccaccacgagaatgaaggcgacggtctgcatgtagccgagaccgagcttgacgaggatgatgttcacgccgtagcagaacgccgaggcaagacccatgacgaacgtaacggcgagacccataccgacggcggtgtcgctctttttcgacacgccgaggaacgggcagatacccaagaactgcgagaagatgaagttattcgtcaaaatcgcgccgagggaaatagcaagaagttttgtgacactcatttatttgccctccgtttcgtttgcttttgcctttttcttctcacttctggcgagcgcccactgcatgatggcgatcagcgtgccgaggcacaggaagccgccgacaggcagcgtgagcataacggcaggaacataggaagaaggcatgatctggatgccgagcagcgtgcccgcgccgagcagctcgcggaacgcgctcaggatcagcagcaccaccgtgtagccgatgccctggcagatgccgtccaccgcggaggcggcaacagagttcttgctggcaaaggcctcggcgcggccgaggatgatgcagttgacgacgatcagcgggatgaacacgccaaggctctcggcgatgtcagggacaaacgcctgcaggcacagatcaacgatcgtaacgaagcccgcgatgacgacgatgtagcacgcgatacgcacttcgttggggatgatcttgcgcagaagggaaataaagatgttggaaagcgtcaggatgatgagaacggagatgcccataccaaagccgtttgcaacactcgtggtgatggccatagtggagcacataccgagcacctgcaccagaacggggttttggtagatcagaccgtctttgagctgtttgttgaaattcatagatcgttccccctttctcagttcatggcctcggcggcagccagagcggcgttgacgcccttggtcacgcccttggtggagaccgtcgcgccggtgacggcgtcgatgttctgcttgacagcgagcgtgcccgcgccggacttgccgacgaactggtcaagcgcgccggtgcctgcggaggtcgcttcattgtcgatgaccttggagccgatgcccgcggtctcggaagccttaacaatggaaacgccggtgacggcgaggtcggcgtccacgccgacgatcatctcgatgttgccctgagatccgctcgcggtgaccttgaaggcatagccgatggtgtcgccgccggacttgacctcatatgcctcgctcagcttgccgccctggtcgttggcggcgtcgatcatggcctgcgggatctcctccatcggggggaattcgcagtcggccgcagagacgaccttggcgagcgcctcttcggtcttctgctggttgatggccgcgatcttgtccgcggtcagcatgttggtcaggcccagcagcagcgcgacgaccagcgagatcgccgtcagcgtaccggctaccttgaaaatgaatttaccttcgatcttcatttctttgccgcctccttcgctgctttcttatctacgccgaagcgggtgggcttggtgtacttgtcaatgatccaggtgcagcagttcatcacaaggatggaatagcaaacgccctcgggataagagccaaagtagcggatgaacaccgtgatgaggccgcagccgatgccgaagatcagctggcccttcttcgtgacgggcgaggtgacatagtcggtggccatgaagaacgcgccgaggaacaggccgccgccgagcacgttgtagagcatccagctcatcgcgtcgttgccctgggggaagaggaacgtgaggactgccaccgtgccgatgtaggcaacggggatctgccaggaaatgaccttgcggaaaattaagtacaatccgccgatgagcagcatcatcgcggagatctcaccgagagagccgccgatgttgccgatgaacatatcggacaggctgtactgtgccgtcacctcggcaaactcgccgcccttcatcatggcgagcggggtggccgcggtcacgacgtcagcgccgccgaagagaggcgccttgccggaggccgggtcgatccaggaggtcatctggctcgtgtagcacgcgacgagcgcggcacggccggccagcgcggggttcaggaagttcttgccaaggccgccgtagagctgcttgacaacaaaaattgcgaagaagttgccgacgatcagcatccagtagggaagcgtcacggggcagacgaacgcgagcaggacaccggtgacggcggcggacaggtcgccgagcgtctgcgtcttatgcatcagcttacggtagagccactcgaaaaacatcgcggaaaccacgctcacgagcacggagatcagcgcgcggaagccgaaacggatgacgctcatgatgagcgcgggacacagcgcgatgatcacgtcgagcatgatcgagcgcgtgtcttcattgttgcggatatgggggttggaggaagcgatgagcttcagacccttataatcattcagcatctcttaagcctccttctttgcttcttcggcagccttggcagcctcagccgcggccttggccttggcggcggcttccttgaccttctgcttgccaaccttgaacgaatgcgtcaggtgcaggcggcccgggcagatgtaagagcacgcaccgcactcgatgcagtccatgacgtgggccgcctcgagatcctcgatgcggttcttctgcacatataaatagaggtacaggggctcgaggtgcatggggcacgcctcaacgcagcggccgcagcggatgcaggtcgggtcctcggagaccttgttctcattcgcggcgaacgccagcaccgcgcccgtgcccttggccacggggaagtcggcggaggcctgcgccatacccatcatcgggccgccggcgatgagcttgaatgtctcgtcctttaagccgccgcaggcgtcgaacaggagcgaaacgggcgtgccgatcgggcactcaaggttcttcggctccacaacgccgctgccggacacggtgacgaccttgcgcaccacgggcatgccgtccttgatggcatggtagatggcgatggtggtgttgatgttgaacacggcgcagccgatgttcgcgggaagaccgccggggggcacctgcttgccggtgatggcctggcagagctgcttttcaccgccctgggggtagcggcagcgcagcgattcgaccacgacgggagccttctgctcggcgatgaccttgttgagggcctcgatgccgtttttcttgttgtcctccacgccgatgacgaccttgctcacgccgaacatcttggcgaggtagcagcagccgccgatgatctcagcggggcgctcaagcatcgcgcgatggtcgccggtgatgtagggctcgcactccgcgccgttgatgatgacggtatcgaccttgccgatgccgctggagatcttcgtgtgcgtggggaacgttgcgccgcccataccgacgataccggcctgcttgaccatttcgaccatttcctccacgctcagcgcgtcggggtcggcgggggctttcacctcttcgctcagctcgtccttaaagtcattgtcgataacaacggacatgaccttgccgcccatggaatagggacggggctccaccgcagcgaccgtaccggatacgcttgcgtgaatgggagcgccgagacctttgaattcgccgatcttctgtccaagcttgacatagtcgcccttggagaccgtcggggtgcagggtgcgccgaagtgcatcgacatggggatcaccacctgagcaggggcttgtaactgctcgatggccttttcattggtagcagccttcatatcattgggatgaacgccgccaaagaaagcttgtgccatagtcttcacctcatctttatactgccagagcagcggaaacactgctccataatcggatagattatatcccctttcttttctcttgtccagaaaatattcttcatgaccatcattttcctacataatttatcagatttcgccgtcattttttcgcaaaaacagcattttgccaaacaattcgcctttcggcggcccgcggagggaataacccatttctccgcttcttgacgtgtcccgggcgcgatgctataattatgtattactatttttatgaatttcgtgcattttccgcactttgccgtccgtttttccccgttccggcaagaaaggagcttctttatgcccatgcagctcgataccggcgcgatcaaggcagaatcgcgctcactgctgcgcaccggtgaggtcaatcctttccggatgacgcttttctatcttctcatcacccttgtgctcgatatgatcaactcgggcgtgagctatatgatcgactccgccggcggcttcacagtgctctcgttcagctttgtgagcatcctcgtcggccttgtcgcactcgttctgaacgcggggtattactgctactgcttcggcatcctgcgccgcgaggaaatgccgtatgagagcctttttgacgcgttccccttcgccggaaaggtcatcctgctttccatcgtcgagggcgttttcatcttcctgtggtcgatgcttttcgtcatccctggcatcatcgcggcctaccgctactcgttcgccatgctgaacctgtgcgaaaatcccgagctcggcgtgatggaggcattgaacctgagcaagcagcagacaaacggctacaaaatgcagctcttcctgctccagctcagcttcatcggctatcagatcgccgcggtgcttatcgcgctgctctacgaatacgtcatcatcagctacctgcccgactcgctctccggtgcggtgctcggtgctctgatctacggcgtgctctcggcggtcgtggacgtctacctgacgccgtatctgaacctttcgacctgccgcttctaccagctcgccaccgcgccgcaggtaaacgagccgccgcacttcgactcctggaacgacaacttctgaacgcagcaaaaaagagggatatctcgcatgagatatccctctgtcatttttgttttacttcagcacgtagacgttcttgatgccgagcagcgcgcagagttcggtcttttcaacgatgtccgcctcgctctcgtaccagacgacgatcgtggagccgtccttttccttacagagaaggtacgagctgtcgaagcggttcgagcgcgctttctgcacggcactgtcgttcaaatacgcgctcagctcgtcctgcgtcagctcgcgcagcgcgcccaccttgccgcctttcacgttctgcgccgcgggaacggcgttgatgaccacgctgcctcccttgccggccttgaccgccgcgtcgtagacctgctccaccgccgcgcgcggagaaagcggcaccgcgccgctcgtgcccgtcaggctctcaaccggcaccgcgccggagggcgccgcgctcacgctcgtcacgctgactttggccttgaggccgttgtaggcgcgcagcagcaccgccgcggcctgctcgcgcgtcgtgtcgtttttcggcgcgaacgtcgttaagttcatacccaccacaaggcccatgcgccaggcgagcgtgatatagccgggattcgtcgaaacatcggtgaacgggcactcatcctgcaccgtgccggaaagcgtgctgtaccccagtgcgcggacggtcatcgcggccatctcctcacgcgtgatggggtcgttcggtcggcaggtcgtgctgtggccggagaacacgtcgtgcgcgctcgcggtctcaatggcgctgtagtaccactttttcgcatcctgattgtcggtatagctgcccttttcgggcgttacggtcttccagcccatcaggcggcagagcgccgcggcataggccgcgcgcgtcatcttctgtccgaggccgaacttgccgtttccgatgccctgcaataagttgtactgcttgcactgcacgatgctttggctcgcccagttcttgtccggcacgtcggaatagccggatttgttggcggcaagcgcgagcgtcgtggtcatcacgagcgcgagaagaagcgccgtcaggcgcgtcatgatctgtttcattggtattttcccccttttgggtgatctttctgccgtattgtagcacaaagtcgcgtggatagtcaaatttcctctttacctttgcggtggtttttgttaaaataatagattgtattagtatgatgaggcagtattgcctgagatagtatgcccaaaagttctcaaaagaaagaaggtgagccgaaacatgaagtacgagcactggcagatccccgccgcgccggaggatgccatcaagacgctgatggacgcgggatacccctatcttgtctcgtcggtgctggccgcacgcggcgtcaccacgagcgagcaggccgccgaagcgctcgagcgcgagaagacgctcgcctactctccgtttttgatgaaggacatggacaaggccgtcgcgcgcatctcgagagcgcttgaaaacggcgaaaagctggctgtcttcggcgactacgacgtggacggtatcacctcgacctgccttctgaccgattatctccgctcgcgcggggcggatgtgacaatgcacatcccccgccgcatcgaggagggctacggtctcggctgcgacgccatccgcaccctttccgagtccggcgtcacgctgatcgtcacggtcgactgcggcatcacgggcgtggacgagacggcctacgccgcgacgctcggcgtcgaccttgtcatcaccgaccaccatgagtgcaaggagcagctccccgccgccgtggctgtcgttgacccccaccggccggactgcccgtatccgttcaagcatttggcgggcgtgggcgttgcgctcaagctcgttttggcccttggcgaagggcgcgaggatgcgctgtttgcgcgctactgcacgcttgccgccatcggcacgatcgccgacgtcatgcgcatggagggcgagaaccgcaccatcgtgcagtgcgggcttgagagcatcgaccgcagcgactttacggggctgcacgcgctgctgcgcgaggcggggctcacatcgcgccccatctcgtcgatccagatcggctttgtgctcgccccgcgcatcaacgccgcgggccgcatgggccgcgccgagctggccgcggaattattgctcaccgacgatcccgcccgcgcggaaaagctcgcgcgcgagctgtgcgagctcaaccgcgagcgccagagcgtggagcaggacattttccgccgcgccatcgagcagatggaagacctccccgagagcgagcgcagcgcgctcgtgttgtcgagcgaggactggcaccagggcgtcgtaggcatcgtggcgtcgcggctttccgaaaaattctcctgcccgagctttatgatccacctctccggcgggtcgggtaagggctcgtgccgcagctacggcggctttaacctcttcaatgcgctcgaagcgtgctccgaccttcttgtgagcttcggcggacacgagctcgccgcgggctttacgatcgaagagcgcaacatccccgcgttccgcacgcggatgaaccagtatgtgcgcgcccacacgggcgagcatccgccggtgtcgatgctcgacgtcgacgtcgacttgcagcacccctcgctcatcacgcttgaggaggtcgaggcgctttcgctcctcgagccctacggcgcgggcaacaaccgccccgtcttctgcctgcgcggcgcaacgctcgagagcgtgcagggcgtgggccagaaccggcacttaaagctgaaactacagaaaagccgcgtgaatttcgacggcattttcttctccgtcaccgccgacgagtgcggcgtgtgcgcgggtatgcgtgtggacgcggcgttctatctgcaggtgaacgagttccgctcccagcgctccatccagctccagctcatcgacctgcgcccctcgctcgaccccagcgggcgcgagaatgaggcgctttccctctgccgcgagctgattagcggcggcgcactctccccgcgcgacgcagcaagagcgctcccctcgcgcgaccagttcgtgcgcgcgtggcgcattttggagcgcgaggtcgggcctgacggcgtcagcgagcccatgctgccgctgctgcggcatttgagctcggaaatggtcggcgcggagacgtttctgcgcacggcgatgtgtttgcaggtctttgccgagcgcgggcttctttcgatcgagcgcgaggacacgaccctcacgctccgcctgacggcggacggaaaaaaggtcgagcttgacaagagtccctatctttccgccctgcacggctttctttcgtaattaaaggagacgattcggatatgacagcacaggataaagcattaaaagagaataccgcttcggctcccctccagatcgtcgcgcccggcacctgcgtggagaccggcgagcaggcggcgctcgtgctcgggatgtacgaccaccttgtcgagacgatccaccagtacaacccgagcgcagactttgcccagatcgacaaggccttccgctatgccgacacgcaccacaacggtcagctcagaaaggacggctcgccgtttatcacgcacccgctcgccgtcgcgcagatcatcgcagaggagctgcggcttgacagcgagtccatcgaggccgccctcatgcacgactgcatcgaggacacctccgccacgtatgccgagatcgccaaggagttctcccccgcggtcgcggatctggtcgagggcgtctccaagctgacgcgcgtgcagtacgccagcaaggaagaagagcagatggagaacctgcgcaagatgctcatggcgatggccaaggacatccgcgtcattctcatcaaattggccgaccgcacgcacaacatgcgcaccatggagtaccagacggcggaaaagcagcggcagaagtcgctcgaaacgatggaaatttacgcgcccatcgcccaccgtctcggtatgcagcgcatcaagtgggagcttgaggacctgtccctcaagtatttggaccccgtcggctacgacgagatcacccgctcgctcgaggccaagcagtctgagcacgaggcctttatggaccgcgtgcaggcgcagatcgaggcgcgcttaaaagagcagcacgtcccgtatctcaaggtctatggccgcatgaagcatccctacagcatctaccgcaagatgtacgcgcagaataagacgatggacgaggtgctcgacctcttcgcgttccgcgtcatcgtcgacaccgtggccgactgctacaacgtgctcggcatcatccacgacctttaccgtcccattctgggtcgtttcaaggactatatcggcacgcccaagccgaacatgtaccagtcgctccacaccaccgttatcggcgcggacggcatcccgttcgaggtgcagatccgcaccgaagagatgcacgagatcgccgaatacggcgtcgccgcgcactggaagtacaaacagggcatttccggcaacgcaggcgagcacaactacgaatgggtgcgccgtctgcttgaaaatcaggagaacaccgacgctgaggaattcgtccacacgctcaaggtcgacatgttcgccgacgaggtcttcgtcttctctccgcgcggcgacgtgacgaacctccccgccggcgcgacgcccatcgactttgcctactccatccactcggccatcggcaaccgcatgacgggcgcgaaggtcaacgggcgcatcgccccgctcgactatcagctcaaaaacggcgacatcgtcgaaattctgacttcgaaaaacgcgcacggccccagccgtgactggctcaagattgccaaatcgagcgaggcgcgcagcaaaattcgccagtggttcaaaaaggagcgccgcgaggaaaacatcatcaacggccgcatctcgtttgaagcagagctcaagcacctcggcatcccgatgagcgacgtgctcggcacggacatcgaggccgcgcttctcaagaagacgtcgttcggctcgatggatgagatgtacgccgccatcggctacggcggattttccgcgcagaaggccgtcaatcgcatccatgacgagatcgtcaagctcgaaaagcagcgcaaggaggagcgtgccgccaccgtgccggtggacaactccggcgcgacgcgtcccgccgtccccaagcgcacgaagagcgagcagggcatcgtggtcgaggggctgtcgaactgcctggtcaaattctccaagtgctgcacgcctgtccccggcgacgagatcgtcggcttcatcacgcgcggctacggtgtgtccgtccaccgctgcgactgccccaacgccgccattgagcgcagaaagcccgaggagcgcggccgctggatcaaggtcagctggggcacggacgtcaaggagtcgtatcagaccgcgctcgacatttacgccaaggaccgcctcgacctcgtgctcgacgtctccgccgcgctctcgtcctcgcagacgcgcgtggcgtccatcaacgcgacgacgaccgccgacggctttgcggtcattcacctcagtatttttatttccgacgcgcagcatctcgcggcggtcatgcgccggctgcaccagatcagcggagtgatgaaagtggatcgccccgcagggtgagcttttcgtgccccgcaggggcacgggatttgcagcgcgaagcgctgcttcttttcccctcaccgtgtggggacgcgggaaagggggatattctctttctcgaaagagaatatcccccttacacccccaagagaaaggacgaggggccttccccctcgaccccgcacattgccggtctgaggctcgaagagctgcacgcgctgcgcaatcgggtgcggtgtacatggcttcgccatgaatccctacgtttcgttacgtcttgcaaccgcgccttactatcgtgaggcgcgagtgacgttacctcggcggcagactgcttgccgaatgcggcattgctgcgctcgccgcattgtggagactggcggtagacgggaattagtctgcacctctacaagatgggcagagcggcagcggataatagaagcaactcaaatcatatagcaatgctaacgcggcaacgccgcgctatgggcagtgcaatcggcaagcattgcagctcttcgagctgctcgcttgcaatgtaaacgcctttcttttggacgggcaccgcccgttttctttcaacggaaagaaaatggggggtgcattgggcagcagcgctctcgcgctgcatttcccctccgcgctgtgcgcggaaagacactccccctttggggataaaaaggagaatcatcatgcgagcagtattgactaaggttaaacacgcctccgttacgatcgacggagagctcaagggcaagatcggcaggggctttttgatcctgctgggcgttgcgcctgacgacacggaagaaaaatgccgcaagatggcggacaagctctgctcgctgcgcatttttgacgacgagaacgacaagatcaacctctccctcgacgatgtcggcggcgagcttctggtcgtttcgcagttcacgctctacggcaactgccgcaagggccgccgtcccgaatttttaagcgccgcgcggccagagatcgccatcccgatgtatgaaaagttcgtggccatctgccgcgaaaagggctaccatgttgaaaccggcgaattcggcgcctacatggaggtcgaatcgctcaacgacgggccgttcacgctgatcgtggactccgccgacttagacgcaccgaaaaagcagtaaagaaaggggttatttcttcatgaaagtcatcaccactgtcgtcggctccctgcagacgaattgctacctgctcatcgacgaggaaacgaagcttgccgcgctcatcgacccgggcgacgaggcggaaaaactgctcgcgctcgtcaaaagcgagggcgtcacgctcaaatacattctcctgacccacggacaccgcgaccacacgcttgccgtgcctgcgctcaaaaaggcgctgccggacgtgcccgtctacatcggcgaggccgacgcccactccaccggcatctaccactacccgatggccgacctcgtccccgatctcaaatactatggcgagggcgatacgctgccgctcggctcgctgacgattaaggtgctcgccacgccgggccacacgctcggcggcgtgacgctgctggtcggcgacgcgatgttccccggcgacacgctgtttgcaggctcgatgggccgcaccgacctccccggcggcaacgacgcgcagatgctcgcctcgctgcgccgtctcgcccagatcgaaggcgtctacactgtttaccccggccacatgaattccacaacgctcgcgcgcgaaaaggcgatgaacccgtatctgcgccatgcgctgcgataaaggacaagaaaccacatgaaactcgagctcattgggcatgatgaaaaatacgcgctggagcagagcttactcacgctcttccccggcgaaaagcccgtttacggcacggtcgacaaaaccgccgacacgcgctgggcgcgcgtgacgctcaccgaagaggatgagcgcgtgcaggtgacgacggagctgggcgtggacggcaagtccgccgcccacagctacgactaccccctctccggcacggagtatgaaaaggaggggcagcgccgtcacgccgtcggcatcagctttttcggcgcggcgaaggatcttctcggcatctcccccgcgtggggcagtttgaccggcgtgcggcccagcaaggtcgcgctctcgctgatccgcgagggtggcaaaaagcgcgccgaaaaggaattgcaggagctctactgcgtcacgcccgcgcgcgcccgccttgccatcgaggcggcagacgccggcatccgcgccgcggcggagctggaaccgaacgacatttctctttatgtcggcattcccttctgcccgacgaggtgcgcgtattgcagcttcgtggcgcagagcgtcgaaaagtcgttctcgctcgtcgagccgtatctggaggcgcttttcgacgagatcaccgcggcggggcagctcgtgcgcgagttagggctgaacgccaagtcgttctacatgggcggcggtacgccgaccacgctgaccgccgatcagatggaccgcctgctcacgaaattggagcagaattttgacttcggtaatctcgccgagctgacgatcgaggcgggccgccctgacacgatcgacgaagaaaagctgcgcgtgctgcgcgcgcacaacaccacgcgcgtttccatcaacccccagacgatggaggacaacgtcctcgcggccatcggccgccgccacacggcggacgacatccgccgcgcgatggaacaggtgcgcgccgcaaacttcccgcatgtcaacatggacctcatcgcgggtctgcccgaggacacgcccgagggctttgcaaggagtctcgacgaggtcatctcgatgggcgcggacaacatcacggtgcacacgctgtctctcaaaaagggcagccgcatcatgctcgaaggcagccgcatccccggcgcggacgaggtcgcgcaaatgctggactatgccgaccccacgctgcgtaaacatggttttgccccctattatctctaccgccagaagtacatgtccggcagctttgaaaatgtcggctggacgaagcccggcggcacggggctctacaacatctacatcatggaagagctgcactccatcctctcgctcggcgcgggcggctcgaccaagatggtcggcggcgggcagatccgccgcgcgttcaacgccaaatacccgcgcgaatacatcgaccggcccgaaaagcgacgcgcgaacctgatggacttcgcccgcttttacgccgaacaaggagaatagcgatgaataagagtgatttctttaccgccgacgcggtcaagccgcacttcacctatgatgattactgcgagagcgcggatatgatcgcgtctcacctcggcgatttccgtcccgaggtactgctggtgctcggcagcggcctgggctttctcggcgaccgcgtcgaggcgcgcacctgcgtgagctatgcggacatcccgcacttccgcgcgtccaccgcgccgggacacgagggtcgcttcgttttcggcgagctgcgcggcaagcgcgtggcggtcatgcagggccgcatgcactgctacgagggctacacgatggaggacgccgcctacgcctgccgcgtcatccgcttactcggcgcaaagacgatgatcgtgacgaacgccgcgggcgcggtgaacaccgagtattccgcgggcgacctgatgctcatttccgatcacatcaagctcttcgacttcggcccgctctggggcccgaacattccggagttcggcacgcgcttccccgatatgtccaatgtctatactccccgcctgcgcgagcttgccaaggaagtcgccaaggagcaggacctcacgctgcgcgagggcgtttacatgtacttccccggtccgcagtttgaaacccccgccgaggtgcgcgccgcgcgcattctgggcgcggacgctgtgggcatgtccaccgtgccggagaccatcgccgccgcgcactgcgggtatgagatcctcggtgtgacgctgtgcgccaacatggccgcgggcgttctcccccagccgctctcgggcgaggaggtcaacgaaatggcagagcagtccgccccgcatttctcctctcttatcctcggctgccttgagcggctgtaacacagtttatttcagctaagaaggaaaaggtcgaaattttaatggctacggaaaagaaacagtcctttttcggcggcgcggcggtgctggccgccggcgtcgtcatcgtgaagatcatcggcgcgctcttcaagatcccgctcgcgaacattctgggcgagacgggcaacgccgacttcaacaacgcctacaacatctatgctgtgcttctgaccatctcgaccgcgggacttcccgtggcgctctcgaagatgatctcggaggcgaagacgctcgggcgcgagcgtcaggcgcggcgtgtgctcaaggtatcgttcgccgcgtttttaacgctcggtgtcctctcgtttgtcatcatgtggttcggcaacgagaagtgcgcggcgcttctcaataacccgaacgccgcctacggcatcaaggcgctcgccccgggtgttgtgtgcgtcggctgccttgccgcgttccgcggctttgcgcagggcagcttccgtatgacgccgaccgccgtctcgcagatcatcgaggcggtcagcaagctcttcatcggccttggcctttcgatgtacgtcgtgagccttgggtacgaggattacatcgccgcggccgcggccatcgtcggcgtgacggtcggctcggtgctcgcgctcgtctacatgctcatcgactacttgcgccaccgcccgcgcaccccgggcacagacacgccggatgcctccggcgcgatcttgaagcgcctgctctcgattgccatccccatcacgctgtcggcttcgatggtgtcgatcatcacgctgatcgacacgtcgcttgtgcagggtcagctccaaaacgcgctgggctacacgctcaaggagacgcgccacctctacggcacgtattcctcgggcatgaacctctacaacctgccgtcgtcgatgatgacggcgctgaccatctccgtcatcccgacggtatcagcttcccttgcgcgcaatgaccgcgtgcatacctcgcgcgtcatcaactcatcgctgcgcgtcacgggtctgatggccttcccgatgggtcttggcctctgggcgctggctgagcccattatgaagctctgctacccgcgctatgacagcgagctcggcggctcgcttttagccgtgctcggcatcgcgagcatgttcgtctgcctgatgctcatttcaaactccatcctgcagtcctatggccgcgtgcatgtgcccgttttcacgatgctcatcggcggtattgtcaagatcatcttcaactacaacctcaccgccgtgccgtccatcaacatccacgcagcgccctacggcacgctcgtgtgctttgtgatcgtatcgtcgctcaacctctttttcgtctaccgcacgatggaggataagccgaattacttcaaggtctttgccaagccgctgatcgcatcgctcgtaatggccgtgtgcgccagattctcctatcgcttcttcgccgcccatatcgcgcttggcggcgcgaccacgacgcagatcgtgaacgtcggccttgcggtcgtgctggcggtcatcgtgtacgtcgcgcttgtcctcgccctgcggatcgtcacacgcgacgacctcgcgctgctgcccaagggcgaaaagctcgcccgcatcctgcacgtgcgctgaaaacccctgaaaaatcagggaaattgcgcaaaacgccttgcaatgagagggaatatatgataaattatcctgagaaagatatctacacttatgacgaccttgtcgacattctgcgcattctgcgcgcgccgggcggatgcccgtgggaccgcgagcagacgcacaagtcgaaccgccgcaactttctggaagaagcgtatgaggccgccgaggcctttgacctcgacgatccggagctgatgaaagaagagctcggcgatgtgctgatgcaggtgctcttcaacatccacatggaagaggaagccggccgcttcacgaccgacgatgtgaccgaccacgtggtgcgaaagctcatcttccgccacccgcacgtgttttcgaacacgcgggcggacgacagcgagcaggtgctcgtcaactgggacaagctcaagcggcaggaaaagggccagcgcaccacggccgacgcgatggattccgtcgcccgttcactccccgccctctggcgggcggacaagctgcagagcaaggccgcgaaggcaggctttgaattccccgatgtctccggcgcgctcgacaagctcgacgaggagacacaggagctgcgctccgccgttgaaaacggcacaaactttgaagaagagctcggcgacgtgctgtttgccgccgtcaaggtcggccgcttctgcggcgtcgaccccgaggcggcgctttcaaagacctgcgaaaaattcatcgcgcgcttccgcaaggtggaagagacggtgaatgcgcgcggcgaggatatgtccgctctcccgctcgatgagctgatggcgctgtggaacgacgccaaggaacaactcagatgaccaaaagcggcaacgctttttgctcatatacaccccggaggccccgtctccggacactattcaggaggatcaaacgatgaacaagactgaactcattgctgccgtggcagaaaaagccagcatttccaagaaggagtccgaggttgtgatcaacgctgccctcgacaccattatcgactccctgaagaacgacgagaaggtccagctcgtcggcttcggctctttcgagaccaagcaccgcgctgagcgcaccggccgcaaccccaagaccaaggagagcatcaccatcgccgcttccaaggtcccgaccttcaaggctggtaaggcgttcaaggacgctgtcgcggagtaattccccagtcaagctctttcatcatcaaaacggcggcgcgatgcgccgccgtttgagttggtggagcccctttgatcccgcacttttccgaaaaggagacgaattccatgcgtcttgacaaatatctcaaggtctcgcgccttatcaagcgccgcaccgtggccaacgaagcctgcgacggcggccgcgtgaccgtcaacggcaaggtcgcccgcgcgtcgtacgacgtgaaggtcggcgacgtgatcgcgctgcacttcggcgagcgcgtgctcgcggtcgaggtgctcgatgtatccgagaccgccggcaagagcgaggcctcgctcctctaccgcgaagtgaacgcacagtaaaccgtactattttgggtgcgcccttcatacgttatcgtatggagggcgctttctttgcgcccaaagcgaaaggacgggttctgactatgacttacgacacttcccccgcttctccccagcgcatcgaattatccggccgcgagagcctgacggtctccggcgtggaggatgtcgaccgcttcgatgagaccgagatcgtgatgaacacgtcgctcggcgtgctcgttgtcacgggcgacagcctgcacatcggcaagctgagcctcgacggcggcgagctgcatgtcgacggacgcatcgacaccatcgcctttgaggatgcgccgtcaaaccgcggtggcctgctctcgcgcctgttcgggggttgaggcaccgtgggcgtgtcgctctccgagcaggcgcggtgctttctcgcctcgctcctgctcggcttcatcctttctctcctctatgacctgctgcgcgccgtgcggctgcggcgggcgacgaagcggcgctttacgagcgcgctcgatctcctctactgcgcggcgttcgcgctgctgacgtttctcttcgcgctgcgcatcggcgggggcgagctgcggctctatatgctcttctcggtgctgctcggcgcggtgagctacttcgcgttctgcgcacggcttttccgtccgctatgggccttctgggcggaggtgctgttctcctttgcgcgattagcggccgcgccgctgcggtggctccaaaaagtttatggtaaacttgccaaactttgcaaaagatactttcttttttccagaaaccggcttataataaagtcgtatgagcgccgcgcccgttattcgctgcgccgcgcaaggaaaaaggaggctcatcggcatggcagagcaggccaaaaaaggcaaaaagcgcaccagctttctcacgatgctcgtcatcgcaattctgatcgcactggtaggggtgcagctcattcatctgcggagccagatcgacgacgcgcgcagccagctcaccgcgctgcagagcgatcttgacactgccaagcaggagaacgacgcgctcgcctcggcactcgaaaaggccgacgaccctgagtttttgcaggagcttgcgcgcgatcagctcggctacgtaacgccgggagagaagacgttctacgacgtgagcaactaaaaagagaacattattgaagcgcccgttgagggcgcttttttcttgcgtgaaataaaaaggagccgccggccaagatggcccgcggctcaaatgggtgggatattggaaagcttccgatgcttatgataccgcccgtccgccaaaacgtcaatgggagcttttgccgcattctgccgccttttgtcaattcgcgtcgtgtgccttataatttgtcaatatgtacaagaatgctcaattcatatatcgttcatttgaaattttcgttcattcgtgctatgatatagaaaaggaaacagaagggcaaaacacttctctttccttcctcaccaacgaaaggagccaacactatgaaattcacctacacctgcaaaaaagtctccctgaacgattccgtcaaggcctatgccgagaaaaaggtcggcaagctcgagaagtttttcaaggaggagcccgaggcttctgtcaccttctctgtcgagaagaagaaccgctgtgtcgccgagatcatgcttcgcggcgccaacggcacgctgttccgcgcggtatgtgaggacccggacggcgacatgcgcggcgcgatcgacgaggccacagcccagatcgagcgcaagatccgcaagaacaagacccgccttgccaagaacctgcgcgccgaggctgtgctgccggagctgcccgaggagttcgaagcccacgaggagggcacgttcgacatcgtgcgcaccaagcgcttcaccgtcaagcccatgagcgtggaggaagccattttgcagatgaacctgctgggccacagcttcttcgtcttccgcaacaccgatttcggcgatgcgatttgcgtcgtttaccgccgcaacaacggcggctacggcattatcgagaccgaggacgacgaggagtaagccgttcagaaagcatatagaagggctgcgcgaatgcgcagccctttttttgcgcgtttttccgtggtatactgagtctgtatttttcggaagaggagaagtcctatgaacacgtttttctgccgcgcgtttcagtgctgctttgccgtcggcgcgcgctttctcccctggcgcacaccggaggtcttttcaggcgaggggagtttactgcgcgccgcagacattctgcgcgaaaacggcctgcgccgcccgttcgtcatcgcgagccgccgccagtgcgcggacgagcacttccgcgccttgcaggaaaaacttgacgagcaggacatcctgctctccatcttctcctcggtcgagacgaatccgtcggtcgagacggtcgaaaagatcgccgcgcaatacaagattgatagctgcgactgctttctcgtcatcggcggcggctcgccgatggacgcagccaaggccgccgcggcgcgcctcgcgcggccggacaagccgctttcgcagcttgcgggactcctgaaagtccgacgccgcattccgccgctcatcgccgtgcccacgacggcgggcacggggtcggagacgaccatcgccgccgttgtcaccggcagtgaccaccacaagtatgcgatctccgacctctgcctcattccgcgctacgcgatcttagaccccgcgctgaccgtcggcctgccttcacacatcacggcggaaaccggcatggacgcgctgacgcacgcggtcgaggcgtacctgagccgcttttacaacacgaagcagacgcgcctgctcgcggaaaacgccgtcgtgaccatcttcacgcatttggagcgcgcgtaccgcgacggcacgtcgctccccgatcgcgcggcgatgcttcaggcctcgttcgacgcaggcgcggcgttcacgcgcgcaagcgtcggcaatgtgcacgccatcgcccacacgctcggcgggctctacggtgtaccccacggccttgcaaacgcggtgcttctccctctcgtgctcgaagattacggcaaagcggcctgtccgcgccttgcccgtcttgccgcacttgtcggcctcaagggcgagagcgaagaatctctcgccaaggcgtttatcgccgaaatccgcgcgatgaacgcccgcatgggcatccccgaccacttcaactgcatccgcgaagagaacatccccctcatggccacctgggccgcgcaggaggcaaaccccgtctaccccgtgccggtcatctacgacgaagcgcgctttgcgcgcgtcatcgagcgttcacaccacagccaataaccttgtcagcattttagcgatacttccccgccgccatctggtataatggtgctgcaatccaaaaggatcggacggttttttatgatcggagtttacgactacaccgtgatcgcaacctatctctcgctgctgctggggcttggcggcctctattccgccgcgcaaaacgagcctctcgacgccatgctgtgcctgatgctcgcggggctgctcgatgccttcgacgggcgcatcgcccgcacgaaaaaggaccgcaccgaacaggaaaagcgcttcggtatccagatcgactcgctcaacgaccttgtctgcttcggcgtgctgcccgccgccatcggctggagcatggactgcgatagactctggttccttgcgacgatgtcgtttttcgcgctctgcgcgctcatccgcctcgcctacttcaacgtgacggaggaggagcggcaggatcagacgagtgaaaaccgcgcctactacctcggcgtgccggtcacggcgagcgccgtgctcgcgccgctcttctatctgctctcgctgcacttttccctgaactgcgcggtcgtctacgcgctggggctgttcctgctcggtgtgctgtacatcacaccgattcgcgtcaagaagccgcagctgcgcggtgtggcgcttttgtccatattcgggcttggcgaactggctgttttgctccgcgtattgacgcgttagccctcccatctctctcctccgggccgtccgaaaggttttcttttgggcggcccctctctttttactttcccgattgacggcgggaagtccgcgtgctatgatagtcggcaactaccgtttgcatgttctgtcagatcgcgaggaatttttatgaaaaaggccgacccccgtctcctgcttgtcgtagcgatgaccgtcttcggcacgctggggctttttgtgcgcaatattcccgtctcgtccggcgagctggcgctgtatcgcgccgtgctgtccgcactgctgatcatcgtatacttacttgtcagcaggcagaagatccccttcgcgcgcatcaaaaaggaggtgccgctgctgctcctctccggcgcggcgatgggtgtgaactggatcctgctctttgaggcctaccgctatacgagcgtctccgtcgccacactgagctattacttcgcgcccgtcatcgtcacgctcgtctgccccatcctcttccacgaaaagctcacgggaaagaaatttctctgctttgtcatgtccacgctcggccttgtgctcatcaccggcatcggcgacacgcgcgggtcagatgacctcaagggcattctcttcggcctcggcgcggcggtgttttacgcgacagtgatcctgctcaacaagtccatccatcaggtcgagggcatccaccgcacgtttttgcagtttttgtctgccatcgtcgtgctcatcccctacgtactctcgacaaatggcatcacactcagctcgctgaacgccgtcggctgggtcaatcttctcatcgtcggccttgtccacacgggcatcacgtattgcctgtacttctcgtcgctcaaggagctgcccggacaggaggccgcgattttaagctacatcgaccccctcgtcgccgtcctcgtctccgtcaccctgctcggcgagagcatgaccgcaatgcaagtcatcggcggcgccctgatcttaggcttcaccctgctcaacgagctctctcccgtgcccaaggcgaaaaaggagtaaatctctcaaatcacgccaaacgcgtcgcagattttgccgcccgcaggcgcgaaataattttaatcgttttttgtcgcgacacgtgcgtgacaaaaaacacctctcagcccgcaagtgtggaaatcgcccgccgttggcgggcgatttatgcgcgcagcgggctgtgatctccctaaaaatagaggccgctcagccatagctgagcggcctctatttttaattcagaaattccttcgggtcgcatggtaccccatctttgctgaccgaaaagtgcagatgcgccggcatcgagaactcggcgatcgagctgctgcccaccgcgccgatgacctcgcccgcggagacatactgtccctcgccgacgcccggcgagctgcggaggttcgcgtacgtcgtttcgtacccgtcgtcgtgcgcgatggtcacgagcgtgcccatcatatcgtcgtcgcgcaccgccgtcacaacgccgctgcacgcggcgagcacctgcgtgccaacctcggcggcgatgtcgatgccgtcgtgcgtgcgccagtcgccaagcgtctcgttatacgtgagctcgtcgaccgaaaacgccgcgacctcctcccccacgagtggtgcgaccacgagccgcggggcgacgggctgcgcgtccgtctcgctctccatcgcgggaacggtatcctccacgcccgtggcctcatccatcacggtgagatcctcgggcggctcctccaccggttctgccggctttgccgcctcctgcggcagctccgcctccggcatctgcggcgtctcgtcctgcaccggaagctctacctgtgaggagacgttctccgcgtccttgtccgccgtatttttcggcagtagcgtccaatagcccgcgacggccagtgccgtcacaccgaggaacagggctatgtataagcccgtcccgccgaagaagtgccgctttgcgcggccgttcgatcctgccatgtttcatcctttccgccgctttgcggctcgtgcgaaaattgcgagcaaaaaagctctgacggtagtgtgtaccgtcagggctttttctaaacatggcagattcgattttttagcggacgatcagcgtcttgccgtccatttccgcgggctgctcaaggcccatcacgtcgaggatcgtcggcgcgatgtcggcgaggcggccctcgcgcagctcggtacctgcgccgcagaggatgaagggcaccacgttcgtcgtgtgcgcggtcatcgggctcttcccgtcggcctggagcatctgctcggcgttgccgtggtcggcggtaatcatcgcgatgccgcccatcttgagcgtcgcctccacgacctgaccgacgcactcgtcaacggtctcgacggccttgacggcggcgtcgaacacgccggtgtggccgaccatgtcgcagttggcaaagttcagaatgatgacgtcgtacttgccggactcgatgcgctcgacgcacttgctcgcgacctcgtaggcgctcatctcgggctggaggtcgtaggtcgcgaccttcggggacgcgacgagtacgcggtcctcgccgggatacgggtcctcgacgccgccgttgaagaagaacgtgacatgcgcgtacttctcggtctcggcgatgcgcagctgggtcatgcccatcttgctcagatactcgccaaggccgtttttcacgctgatgcgtgggaaggcgacgagcacgttcggcatggtcgcgtcatactcggtgttgcagacgtaggtgagcgggaagaactcgcgcttgaagccgtcgaacgcggggtcgacgaacgcgcgcgtgatctcgcgggcgcggtcggggcggtagttgaagaagatgaccgaatcgttgtcggagatcatgccgtccttgtcgcagacgatgggctcgacaaattcgtccgtcacgccgtttttatagctctcctcgatggcgtggatggggtcgctgtcctgcacgccctcaccgtagacgagcgcgtcataggcgttctcgaggcggtcccagcgcttgtcgcggtccatcgcgtaatagcggcccatgacggtcgcgatcttgccgacgccgagctcacggcacttttccatggtctttgcgacaaagtcgcggccagaggtcgggggcgtgtcgcgcccgtcgaggaaggcgtggatatacacgcgctttaagcccttgatgtgcgccatctttaagagcgcgtagaggtggtcgagcgtggagtgcacgccgccggtggagtgcagaccgtaaaggtgcagcgcagagcccttttcaaggcagtcgtccatcgccttgttgtaggcgggattttcaaagaacgtaccgtcctcgatcgagcgggtgatgcgcggcaggtcctggaacacgacgcggccgccgccgatgttggtatggccgacctcgctgttgcccatctggcccgcgggcaggcccacgtcaagaccggaggcctggagcgtcgtgtgggcatactcggcaaaaaggccgtcgagcacgggggtgttggccgcgcggaccgcgttgccgacggtatcgttggacaggccgaagccgtccatgatgatcagcgtggtgggagttttattcatcgattttcctccttactcctggttggcagcgtggacgatctccatcagcgccttggggtcgagcgaagcgccgccgatcaggccgccgtcgatgtcctcgtgcgagagcagctcgtgggcgttcgagcccttcatcgagccgccgtactgaatggtcacgctgcgggcgatgcgcgcgccgtactgcgcgcggatgagcgagcggatataggtgcagacctcggccgcctgctcgcccgtggcggtcttgccggtgccgatggcccagatgggctcataggcgatgacgcagcggcgcatctgctcggcgctcacgcccgcgagggcggacttgacctgcagcgcgatgagctccatcgtcacgcccatctcgcgctgggcaaggctctcgcccacgcagatgatggggttcagccccgcctcgagcgcggcgaggacctttttgttgacgatctcgtccgtctcgccgaagagcgcgcggcgctcgctgtggccgacgatgacatagcgcacgccgaggtcggcgagcatgtcggcggaaatctcgccggtgtaggcgccgctcttttcaaagtagacgttctccgcgccgacggcgatgcggctgtccttgaacgagcgcacggcggcagaaaggtcgaccgtgggcacgcacacgacgatgtcgcaccatttggttttgggaaggatggccttgaactgttcggcaaaggccttggtctcgctgggggtcttgttcattttccagttgcctgcgatgatggttttacggtatctgcgattcatgttgggtcttttctcctgttactgtctaaatctaagatttatgcgaatatatgaaaatcaatagtgatttttctcacttgtctaaaaggcacgcaacgcccggtaattccttgccttccaggaactcgagcgacgcgccgccgccggtggagatgtgcgtgatcttgtcggcaaagccgagctgctcggctgccgccgcgctgtcgccgccgccgatgatcgtgaccgcgccgctctcggcgagcgccttggccatggccttcgtgccggtcgcaaaggttgggaactcaaaaacgcccatggggccgttccacacgatcgtgcccgcgcccttggtcgccgcgcagaagagctcgacggtcttggggccgatgtccatgcccatcatatccgcggggatgtgcatcgcgtcgacgacgtggggctctgcgtcggcggcaaactccgtcgccgcgacggtatcgaccggcagcaggagcttgacgcccttctgcttggccttttcgatcatctcgagcgcgtaggcgcacttgtcttcctcgagcagggacttgccgatctcgccgccctgcgccttggcaaacgtgtaggccatgccgccgccgatgatgacggtgtcggccttgtctaaaaggttgttgatgacggcgattttgtcgctgaccttcgcgccgccgagcacggcgacgaacgggcgcttgggatcatcgagcgccttgcccatgacctcaagctccttggcaacgagcaggcccgacacggcgggaagataggcggccacgcccgcggtggacgcgtgcgcgcggtgcaccgtgccgaacgcgtcggagacgtacagctccgccatggaggcgagcgccttggcaagcgcgggatcattctttgtttcgcccggctcgaagcgggtattttcaagcagcatgatctcgccgcccttgagcgccgcggccttggccttggcgtcctcaccgacgacgtcgtgcgcgaagatgacatccttgcccaaaagctcggacaggcgcttggcgacaggcgcaagcgtcagcttgtcgagggactttttccacttctcctcggtcagcgtcgcggggtccttgcccttttcggtctgctttttcacccacttgtcaaacttggcctcgggcttgccgaggtgggagcaggcgatgaccgccgcgccgtggtcgagcagataccggatagtcggcagcgcggccacgatgcgcttatccgaggtgatctcgccggtctccttgtcctggggcacgttgaaatcgcagcgcagcagcaccttcttgccgctcacgtccacatcgagaacagtcttcttgttataattcatgttgtttcctcctcatacacatacgatttggttacgcagttgaaacgaatttgggatttactccttttccagcatttccccctcgtgcttgaggccgggaaagcccgtctgccgcagcgcttcatacgtcaggatcgccacggagtttgatagattcaggctgcgcgcctccttccgcatcggaaggcggatgcagcgctcatagtgcgccacgcggaaaggctccggaaggcccgcggtctcctttccgaaaaagagccagcagccgtccttgaattccgcctggcagtagtcctgcggggccttcgtcgtggcgagccagcagtctcgttccgcctcgggatgctttgcaaaaaggtcggctaaattttcgtacacgctgatatccacaaggtaccagtagtccagccccgcgcgcttgacggcgcggtcggaaatgtcgaacccgaggggcttgatgaggtgcagatgcgcccccgtcgccgcgcaggtgcgcgcgatattgccgcagttttgcgggatctccggctcgacgagcacgatattcagcatgacagcacctcctccacgcgaaagttttatcattgtaccgcaaaaatattgcgaattcaacctaaaatgcagtcttttgaaacgaaattttgaaaatgcaaaagtaaagccgccaaatcaaaaattttttgttttttttgtgagaaacggtggatttttcgggcatctttgctataatgtcgttaatagagagtagaattgaaaggagatgagctccgatggatcagaagttggcagttctctttatgccggacgatatgaccctgacaaaagaacaaacgccgctgatgctgaggcccattttgttctgccccattctcacgtggatggtcgaagaactgatggggcggggcattgagcggttttttattgtgtctgacaaacgggcgcacgacatgatgcgcccctacatccccgaaaacgccgacgttgtctacgtcgacggtgccagacacggggaagagcttttaacgctcctcaagggtgaaaagggcagcgtgctcatcgtcaacggcgcagtgctgcccgtgggcgtgttctccggcggcgcggtctactccgcggacgcgaaggagtgctgcaaggtgctcaaggagcacggcgccttcgccgccttccccaagggggcggagatcacgaagggctttttgcccgtcggcgacgacgaggagctcagatccgcacaggacatgtgccgccgcaagatcgccgacaagcactttgccgtgggcgtttccatcatggaccccaacaatacctacattgacccccgcgtcaagatcggcagcggcacggtcatcctgccgggaacgatcctgcgcggccggaccgtcatcggcaagaactgcaccatcggcccgaacgccatgatccgcgactgcacggtcggcgacgagaccgaggtgaacgcctcgcagctcaatgaaagcacggtcggtgcgcacacgaccgtcggcccctttgcctacgtccgtccgaactcgaagatcggcgatcatgtcaaagtcggcgactttgtcgagatcaaaaacagcgtcatcggcaacggcacgaagatctcgcacctcacctacgtcggcgacagcgattgcggcgagcgcatcaacttcggctgcggcacggtcacgacgaattacgacggctttaaaaaattccgctgcacgatcggcgacgacgccttcatcggctgcaacacgaacctcatcgcccccgtcacggtcgggaacggcagctacatcgccgccggctccaccatcaccgacgaggtgcccgccgactccctcgccatcgcgcgcgagcgtcaggtcaacaagcccggctgggcggaacagtggcgcgcggcgcacgagaaaaagtaacttcagaaaattttttataaacagaggagtacatcaacatgatctctcacggtaaggacatcaagattttcaccggcaacgcaaaccccaaactggcagcggacatctgcaagatcatcggcaccaagctcggcgagagcgaggtcaagagcttcgcagacggcgaggcctccgtctccctgtacgagaccgtgcgcggcagcgacgtgttcctcgttcagtccacctgcaagcccgtcaacgacagtctgatggagcttctgattatggtcgacgcctgccgccgcgcttccgccggccgcatcaccgccgtcatgccctacttcggctatgcccgtcaggaccgcaaggccaagagccgcgaccccatctccgccaagctcgtggccaacatgctcgtcgccgcaggcgttgaccgtgtgctgacgatggacctgcacgccaaccagatccagggcttcttcgatatccccgtggataacctcttcggcaaccccatcttcgtcgactactacgccaagaagttcggttccgtgtgcgaggacatggtcgtcgtctcccccgacgtcggctccgtcgcccgcgcccgcaccttcgcccagaagcttcacatgaacctcgccatcgtcgataagcgccgccagaaggccaaccagtgcgaggtcatgaacgtcatcggcgacgttgagggcaaggagtgcatcctcttcgacgacatggtcgacaccgccggttccctctgcaacgcggccaaggccatcgttgaggtcggcggcgcgaagaaggtctacgcctgcgcgtcccacggcgttctctccggccccgcgctcgggcgcctggccgcgagcagcatcgaagagctcgccctgctcgacaccatccccgcccctgccggcgacgatgagcttgctaagtcccgcatcaagtacctgaccgtcgcgccgatgttcgccgaagcgatcgagcgcacatatcaggaaatttctatcgcgaaactttttaactaattcgttaaaacgattttgtcccccaccttaagtggggacgcggttaagggggatattctctttcctcggaaagagaatatccccctttgacccccaagagaaagggattagattggcagtctggagctcgaacaatctgtatgcctccggaatgaaaatgcctgcacgcggcaaagctgcgttagcattgcgatacgatttgcctctactcctattatccgctgccgctctgcctgtctcgtagaagtgcagactaatatccgtctaccgcggcactcctcaatgcggcgagcgtagcaatgccgcattcggcacgcagtccgccgccaagcaaacgtcactcgcgcctcacgatagtaaggcgcggttgagagttgttacgactcgcagggattcatggcgtagccatgtacaccgcacttacattgcgcagcgcgtgcagctcttcaagcctcaaactgccaatgcaaacgcctttcttttggacgggcgacgcccgttttctttctcgggaaagaaaatgggggtcgcatcacgcggcacatgtgccgcatcccccttcgcacctgtgtgaaaaagcatccgcgccctcacgggcgcaaaaagtgaggaacattttcatgattttcaaaaaatccggcccgccggaatggctgctcgtctgtttgggcaactacggcaagcagtatgaaaacacccgccacaacatcggcttcatggccgcggagcgtctgatcgacaagcgtgatctgcgctgcaaccgcctgcgcttccgcgcgctgacggaggtcatcgaatttggcggggcaaatgtgcttttgatgatgccgcagacctacatgaacctctccggcgaggctgtgggcgaggcggcgcggttctataaaattcccgccgaccacgtcatcgtcatctccgacgatatttcgctcccgctcggcaagctccgcgtgcgcggcagcggcagcgcgggcggacacaatggcctcaagaacatcatcgcgcacctcggcactgacgctttcccgcgcgtcaaggtcggtgtcggcgcgccggagcacgacattgtcgactgggtcatcggcccgttcacggccaatgagcgcaaggtcatcgacggtgtgctcgaccgcgcgctcggcgcggcggagtgcatcatcaccgacggcgtgagcgccgcgcagaaccgctacaacggctgaacgctttttgccgccaaaatttaaaaaatcgacatagactttttgccaaaagcctatataataaaatgactgacaaccacgggcatgacccgccgcggctgcggcggatctgcccttttgcgcgttgcggaaggagggatacggcatggcgcagggaatgaacaaactcaatgaagcgctcgcatctcttcccgaggtgcgcgaactgctgctttcgctcgacgcgggcacatcgcccatcgccgtgtcgggcctttcgggtgtgcaccgcgcccagcttgccgctgccgtgcggcgcaagacgcagcgcccgcttttgatcgtctgcgcggacgaaaacgaggcaaaccgcatggcgggcgacctgcacgagctgctcggcgaggatgtgagcctgctgttcgcgcgcgaatggcagctgcgcgaccgcgtgttcgcctcccacggctgggagcagcagcgcatcggctcgctgtgcagccttgccgccggaaaagcgccgatcctggtcgcgacggttgacggtctgatgcagcgaacgctcccgcccgacacgctgcgcggcgcggtgacggacatttcgctcggcgaccgctttgatctgagcgcgctttcgaaaaagcttgtcgaaagcggctacacgcgcgcggaaaccgtcgagggcgtcggccagttcgcgctgcgcggcggcattctcgacgtctggtctccgctgagcgcgcccgtgcgcgtcgagtttttcgacgacgaggtcgacgcgatgggcgaattcgacgtgacgacccagcgccgcacgcagaacgtcaaatccctgaccgtcctgcccgcggcggaggtgctgcccgccctctcggacggcggacgcgaagaaatgctcgagcgccttgggcgcgccgcgcagaaaattgcaaaaaaggccgaagacagccccatcgtccaaacgctgcgcagcgacatcgagaggcttcgtaacgacctgccgctcggcggcatggaccggtatctcgccgcgtgctaccccgaagaggtctgcgcgctcgactatctctcgcccgacacgctgatcgccgtcagcgacggcatgcgcgttttggagcgcagcaagaactaccactgggagctctccgaggacgtgaagcccctcatcgaagagggcattttgtgcggcgaattcgccgcgctcgcgctgagtcaggaggcattgagccatcgcatgggtgcgttccccgtgctgctgctcgattcgctccccacgtcgcgcaatctgctgccgccgagggccatcctcagcatgaacgcgcgctcgctgccgtcgtacggcggcagcctcgagaccgccgcgggtgatatggagcggtatcttggcgcaggctgcggcgtactcgttctctgcggcaacgaaacgcgcgcgaaaaacttccggcgccttttggaagatcgcggcatccgcgcgcagcttgatttgaaaaacgaccgcctccccgccccgcacgagaccgtcatcggcctcggcgcgctgagcgcgggcagcgaatatccacaattaaagctcgtcatcctgaccgagggccagctgaccgctcccctctccggcaagcgcgcgaaggcgcggccaaagaaggagacgtcggcccgcgccgcgctgcgctcctatgaagacctctcccccggcgatctcgtcgtgcatgtgcaccacggcatcggccgctttgcgggcatcgagcgcatgcgcgtcgacggcgtggacaaggactatatcaagatctgctacgcgggcaacgacagcttatacgtccccgcgacgcagctcgacatggtgtcgaaatacatcggcggccatggcgaggacgaggacggccagcagcgcacgaagctcagtaagctcggcggtacggactggtcgcgtgtgaagacgaaggcgcgcgccgcggcgaaggacctcgccaaagggctcatcgcgctctatgccgagcgccagcgccgccctggcttcgccttctcgcccgactccccgtggcagaaggaatttgaagaagctttcgactatgaagagaccgacgatcagctccgcgccatcgccgagatcaaggccgacatggagcgcagtacgccgatggaccgcctgctctgcggcgacgtcggctacggtaagactgaggtcgcgctgcgcgccgtgatgaagtgcgtgctcgacggcaagcaggcggccatcttagtgccgaccaccgtgctcgcccagcagcactacgcgacggcgctgaaccgcttccgctcgttccccgtgcgcatcgaagtgctctcgcgcttcaaaacgcccgcgcagaagaagcaaattttgcaggacgccgccgcaggaaagatcgacttactcattggcacgcactcgctgctgcaaaagagtttgcacttcaaggaccttggccttctcatcatcgacgaggagcagcgcttcggcgtaacgcacaaggaaaagctcaaggagctctcgcgtcaggtcgacacgctgacgctctcggcaacgcccatccccagaacgctcaacatggcgctctcgggcatccgcgacatgtccaccattgaagtgccgcccgtcgaccgccagccggtgcagacatatgtgctcgagcataactggagcgtcatcgccgacgccatccggcgcgagctcgcgcgcggcgggcaggtctactacatgcacaaccgcgttgagaccatcgaccgctgcgccgcgacactcaaaaagctcctcggcgacgacgtcgctatcggcgtcgcgcacggcaagatggacgaaaagggcctgtcgtctgtgatgcagcagctctcggacggagaaattcaggtgctcgtctgcacgacgatcattgagacaggcatcgacattccaaatgtcaacaccctcatcatcgaagacgccgaccgtctcggcctcgcccagctgcaccagatccgcggccgcatcggccgcagcgcgcgccgggcgtatgcctatatgacctaccgcgcgggcaagatcctcaccgaggttgcggccaagcgcctgacggccatccgcgaatacgcggagtttggctcgggcttccgtatcgcgatgcgcgaccttgaaattcgcggcgcgggcaatttgctcggccccgagcagtcgggctacatgatgagcgtcggctacgacatgtacttgcagctcttggaagaggccgtgctcgagcagcgcggcgaaaaagcgccgcagcgcaccgaatgctcggcagacctcacagtctcggccaacctgccggagagctacatttcctcgggcgagcagcgcatggacatctaccgccgcatcgcggcgctgcgcaccgccgagcagtcgcaggagctgctcgacgagctcatcgaccgctacggcgagccgccccagccggttttaaagctcatggacgtcgcgcttttgcgcgcggaggccgtgcagatcggcgtgagcgatatctcgcagcgcggcagcgagatcaccttcacctttgccgcgtccgaggcagtccccgtggaggccgtgatggccctctgctcgctgccgaagaaccgccgccggctcacgctctccgccacggggacggagccgaagctcctgctgcgtcttacgccaaacgaggatgcattggatacagccttgacgctggtcggagacctgcgtgtgaataaggaagaaaacgaaaaagaggtaacattatgatcaagaagagattgctttcgttccttggcgcggcggccatcaccgcggcgctcacctttgccgtcgtgtcgctctcgccctcgaacggcttcacctccggcacgatgcaggagggtctctgctacgaagcgaccggcgtcgcgcccgacgcgatcgtcgcaagcctgcacggcaacggcgcgagcgccgaccttgtcgcatactggatcggctacgacgtgtcgtatctcgacagctacatgcagtattacaccggctcgtccatcaactgggacgacaccctctccgacggcatgagtgtctccgactatgtgaaagcaagcgtgctctcgtccgtcaagcagcacttggtgcttgaaaatctcgccagcaagtacggcgtgacgcttaccgccgagcaggaggccgccatggccgagagcgaccagagctacattgaccagtacggcagcgaggaagcttttgaggccgagatcgccaagctcggcatgcgccgcgagacctatgaccgcgtcgcgcgctcgaactacctgtatcagaatctctatgagctctacaataccgagggcagcgcgctctacgcctccgacgaggacctcgccgtctacgccgccgagcagggctacatcacggcggaccacatcctgcttgcgacgaagaacatgacgaccggcgaagccctcaccgacgagcagaaggccgaaaagaaagcgctcgctgaggagctcgtcgaaaagctcaattcctacaccggcgacgacatcgcctcctactttgccgagctcgccgacgagtacagcgaggaccccggccgcgagacctatcccacgggctacaccttcacgaccggctcgatggtgcaggagtttgaagacgccgcctacgcgctttccgagggcgaggtgagtgaagtcgtcgaatccagcttcggctatcacatcctgctccgcctgccgctcgacaaggccgcagccgccgatgaggtgcgcgacgagtatttctcgaacttcatcgccgagcagttggactccgccgtcatcgccacgagcgaggactacgataagcttgacccgcagatgatctacgaggcgatcgtcgccgcgcaggcggagggttaaatcgcagcgcggcgcactgtacggcgtttgcgcccgcgagggcgcgtgaggggcagcccgaaagggctgcttcctttttgcgtctcggcaggggcgctgcttttttccctgcaccgtgcagaggacaaaataaaaaggagacctctttcgaggtctccttttattttcaggggttagcggtgctttagcacttctcgaagatggtggcaacgccctggccgccgccgatgcagagggtggcaagacccttcttggcgtcgttgcgcttgagcatttcgtgcagcagggtgacgatgatacgagcgccggaagcgccgacggggtgtccgatggagatcgcgccgccgttgacgttgaccttgctcatgtcgaagtgcagctcacgggcaacagcgatggactgggctgcgaaggcttcgttggcctcgacgaggtcgatatcgtcgatggtcaggccggccttctgcatagcctgacgggaagcgggcacggggccaacgcccatgatcttcgggtcgacgccgccctggccccagctgacgagcttggccatgggcttgaggttgtacttcttcacggcctcgccggaagcgaggacgatggcggcagcgccgtcgttgatgccggaggcgttgccggcggtgacgcgctggacgtgcttcttggtatcggcttcgtggatgccggtgggctcgaaggtgtggacgatctcgtcctcaacgccctcggggccgacggggaacgcgccgcgcagcttggcaagaccctcggcggtggaaccggcgcgggggaactcgtccttcttgaactcgacgatctccttcttgaccttcacggggacgggaacgatctcatcgtcaaaacggccggcagcctgagcagcctcggtcttctgctgggaggcagcgccgaaggcgtcgagctcttcgcgggtgatgccccaaacatcgcagatgttctcggcggtagtgcccatgtggtagttgttgaacgcatcccacaggccgtccttgatcatggtgtcgacaagcttcttgtcgcccatgcgggcgccccagcgggcgtcgggagcggcataaggagcggcgctcatgttctcggtgccgccgcagacgacgatatcggcgtcaccggcgaggatggcgcggccagcctcaatgacggacttcataccggagccgcagaccataccgacggtataggcggggacggaataggggagaccggcgcccacgccgacctgacgggcgacgttctgaccgagaccggcggtcaggatgcagccgaacatcagctcatcgacattctcgggagcgacattcgcgcgcttgagggcttccttcacgacgatggagccgagctgagcggcgggggtgttcttcagggaaccgccgaaggaaccgacagcggtacggcagcagttgacgacgtacaattctttcatttgacttctcctttaaaatttgtaaatccggaatgagatccgattttcttcgattttgattatacacacaggaaaatgaaaaatcaactgcaaagttgagaaaaatgtaggcaattttgatttttttctttcatttcgttaactatttaacaagaatgaagaatatcttgcaccacgggatcgttttgcacccaaaggcgcagggaaagcagcgccgctggcgctgcttgggataaggggaccattctctcgcgtgagacaatggccccctttcccgcgtctccacacgctatgggaataaaaagcagcagctctgcctggctgtccccccgcgcccaagggcgcaaaaaagggacgcctctttcgaggcgtcccttttaataagtagtttctacgaaacagaaataacttagaacttgggcttctgggccttgaccttgggctcctggccgttgcagacggcgacgatgtcgttggcgacggaggtgcagcagttcagaacgctctgctcggtggtggcggccatgtgcggggtcatgatgacgttgtcgaggttgaacagctcgcggctggactcctgaatgggctcatgctcgaacacgtcgagaccggcctggaacagcgtgccgtccttcaggcactcaacaagctcgttctccttgatcagagcgccgcgcgcgcagttgatgaaggaagcggtgggcttcatccagctgaactgctcacggccgatggagtgctcggtggagggaacgacgggcagatgcacggacacgaagtcggcctgctcccagacttccttggcggtggccttcagctcgcacagatcgccgatcttgtcctgggtgaggtacggatcgtagccgatgacgttcatgccgaagccgtacttgcacttctgcatggcgagctgggagatacggccgcagccgatcataccgagggtcttgccgccgagctcataggtatgctccatgcccatacggacgaggaagttgccgccgcggaactgacggtcaacataggtgaagcgcttggcgcacatgagcatcagcatgacggcgtgctcggcgacggcgttggcgttgccggcaggcgcgtagacaacggtgatgtccttggcgtgggcgtggtccatgtcgatgttgtcgaggccggcgccctgcttgccgatgaccttgaggttcttgcaggtgtccatcatcttggcggtgatgggctcggtgcggcacatgatggcgtcgggctggaactcggcgagctccttgacgtaggtctcctcgtcgttatggctgcacagcttcacttcaaagtcgttggactcgaagatgtgcgtggccacctcgttgagctcgatggtgtagtaaactttgaactttgccatgatacagatctccttcttcttatttgtttatttattgaatcgctaaatgatttcatacggtttcttcattataccttgcgctttgcacaaaagcaagcgattttcagaaagatttgcaagaactcattcaaataattgaacagcatctttcattttgacgatttgccgtcatgtctttcccccgttttctgcaattttcgctgcaaaacaaaaaaggacataaaaagcgcttgacaaactactacatatgtagtatatagttatcaacgacaaatgtagtagatcatctaaggaggtcatcccatggacgataaaaagagactgcccgacgcggagcttgccgtgatgcaggccatctgggccgtcggcggcgaggtcagccgcggcgatctcgacggcgcgctcgcgagccacggctggagcgccaacaccgtcaacacctaccttactcgcctgtgcgaaaaaggattcctctcgagccgccgcgaggggcggaacaatttgtacacgccgctcgtctcaaaggacaggtacctcgaatttgagagccgcagcgtcctgaagcggctctacggcgggtcgctcggcagcttcgtcgcggcgctgaacgccgaaaagccgctcgagcagagcgagatcgacgagctgcggcagtttttggacgatatgagccgttaaacggaaatataaggaggacgcaccatggaaacatttctgctgaatctgttgaaaacttccctgttaggttccctcgccattctggcgatgctggtactcaaacccctctggcgcgagcgctaccgcgcgaagacgcgctgctggctgtggctggcgctggctgtctttttgctgctgcccatcgatttttcggtaaaaaacgcgccggtgcaggccgcgccgccgaaagactacaccctctttgtcggcacggataagacagccatccaatcgaccgacaacctgtttggcgacatggccgaaaaaagcggccagtcccccgccgcggtgcgcgacacgatcatccagcgccctgtgacgaatcccgagcagaagacgacacgctacatccccgtgacgacgatcttattctacggctatctcgcgggcgcggcggcgttcctgctgtatcagggtgtctcctacaccctcttccgccgcacggtgcgccgctggaagagagacgtcgcccgcgcggactacgccgcgatgctctctgacacggcgcgcgacttaggcgtgagcgcgccggagatgatcgtctgcgaggccatctccacccccgcggtgacaggcctgctgcgcccgcggctgctcctgccccacgagcgctacgacgtgcaggagctgcgctacatcctgcgccacgagctgtgccatttgaagcggcgcgacatgctcttaaagctcgtgctgctcgcggccaacgcgatgcactggttcaaccccgtggtgtatctgatgctgcgtcaggcggacgaggacattgagctcgcctgcgacagcgcggcgaccgacgggctcgaactccccgagcgcgcggcttacagccggacactgctcgccgccgtgcagtccagcgtgcgggcgctgcccgcgacgacgtgcttcggcggcacggtcgagcgtctgaagcgccgcatcacgaacgtgctgggcgcgcagaaaaagcgcggcctcggcattgtagccctcgtgctggcgctgacgctgacggcgggctgcgccgtcagctggggcaataaaaatgagttgtccgacccgttcggcaaatcctataccattgccgatatcgtatacataggggtagagcccgacgatactttccgtgaaaacgcagcgaatgcggagttattgcttcggtcggacgcgcagagcatgactctcacatggaccgaccgctacaaatgggactgtacggcagcgggaagttttgagatgaccgaggaaaactttgaccgctattttgacggctccgcctttgaagccgccgataatcctgctggctggcaggagagcgatatgagcgcggcaaaactgcgccgtgaaaacgcaaacacatggtgttttacgacgtcttctcccccggacggcctgacggattatctgtgcctgctccagcagaaagacggcacgttgtatcttgcaatgggatattatcctgacagcaagcagaccgctccgcactgcttccacacgctattccgtcttgcagaaaaggcggttccgatctacgcctcgatggacgactatgccgccgcgtgcgtggaagacctcaaaaaaggcacgatgacctattccgtgtcggaaaacaatgaatatgcgtcccgctcgatcgaagacacgatcgccgacgtgcgcgtgacgcggctggagcagggcgattcgctcggcaacctctcccccgacggcacggtgctggagctgtggtacttccagtatgagatgaagcccacgaacgaggcgggcgcgcagatcaacattgtcggcgggcaggagttgacggacgacggatatctcaacgagaactggacgcactatctcaccgtcctgcactacacctacggcgagaagaccggctatcagatcatcggcacctcgatgagcaacgacggcctgtggtacaacggctgcggctacggcgaggagctcaagtattacctgcacgacttctatatcgactatgcggggctcaacgagccgaagatgtacattcccaatctcgtcgacggtctggtcgaggacggctacggccacggcaacagcgtcgagggccgtctggtctccggcagcacctacaatttctgctactactatgttcccatcaccggctgggcgtgcagccccggcacggactactggtactcgcgctatgacaccggctcgtatttcagtgtcaagaagctcgagcgcggcatcaacgacgcaaaggcggaatgggagagcaccggcgtgaccggggaaaaggtcgacaccggctgctggcgctacgtgacgcatgagggcatgagcaacacgatcgtcacgctctttgccggtcccaacaacaccacctacgaagtcgaaattcactggctcttcgacggcagcagcgaggagaatcagtggggctggaaccacgaccgcgccgtcgaggaggaggccgtcatcttgcaggcgatggtcaagcactttacgatcaacggaggaatctacttcacggacggctcttccgactccgagtctcccgctgataccgcgttcctgaccgacctccagctcgcggcaaatggcggtattgaatcgctgactctgtttccggctgctacaagttcgattatcagtccgtgcgagccggtcagcactgagggaagcgagttacacgtggacctgagcaactatggctattcttctacatccgaacctgagaatatctccctgctgaatcacatccggattgatttgaaaggcgatagccaatcttggtttgaatcttatcaaggtggaaatgtgatcggctattgcgccgagaatcggccgacagagtattatctggcatttggtgacttcggcaagtatgcgacgctctatgacgtaatactcgaatggtaccacagcgcccagtctggcaccaagccatccgacgcatcttcgaccaccacgacaaatgccgtcagccgcgattcgcttatcaaggccgccgacagctacgtcgatctgggcggttacctctggtacactgctggcggcaaattctgccgctggcacgagggcggcagcgtggagacggtttgtgatctgccgctggactatgatacgcccgtcagcgcgagcctttcgacgcaggacaatcgcatcctgatgagttatcacatcggcggcgcgacaatgggctcgttcatcactgacctctacgacacggacggtaaaaagctcagttcgatcaacggctacaacgccatcgctatcagcggcgacattattgtgatgacggatcatttcatgcccacgccgaacaacctgtccatttcctatgactgcggcaaaacgttcacggaattcggtgacaaggactggttctacggcagcgctctcacagaggacggcacctacgtcacctccgtcaactcctcgcttgagatccgcgacggctacgtttacaccaccgccgtttacgacatcaaccacgagaagtcagacgacccgcttgtaacgcacgccgtgcgcatcagcatcaagaccggtgcgcaggaaattctggactgaagcggtcaaatttcaaaaaggcggcccgaaggccgcctttttctccgcttttttgcgtaaaatgatggaaatattgcaaaaaggtactggaacatctcaaagatatgtggtatgatgggaatattccaaaacgtatttctcgggaggttcccactatggaacacaatccggtcctcaaaaatccgctgtcgctcgacagcgaaattcctctctattcccaactcatgggcatcatcaagcgcagcatcacctccggcgcgctcaaggtcggcgacctgctgccgagcgaggccgagctctgccgcgtttacgatatcagccgcaacaccgtgcgtcaggccatcggcgcgctggaagaagagggcttcgtcgtgcgaaagcgcggcaagggcacgttcgtcactgacccgaacacgcgccgcaagggcgtgcagtattcgttcacgacggaaatttcccagctgggcaaaacgccgtcgtccacgctggtcgacttcgcggtcatcacgccttctcccaagatcgtgacgctcatgggccttgagcagggcgtgaaggtctatcgcttcacgcgcgtgcgaaacgtcgacggcgagccgctcatcttggagacgtcgtactacccagagtacatctacccgaacctgacgcgcgagcttttggagacgcacagcttctacagtctcctctaccacgtcggcgtcatcccgttttccgcgtcggacacgtatgaggccgtcgtgctcgcgccgcacgaggcgcagcttctgcactgcgcgcccggctcggcggcgtttttccaccagcgccgcaccacgaccgagaacgggcatacctatgaatacaccacgagctatatgcgcgcggaccgcgtaaagctggacgtgagattccagaagggatcgacgtccttcatgcgcacggtggactgaaaaaatcggcagccgaaaggctgcctttttttcgcgcccaaagggcgcggggatcttatcgcagcgcggcagcgctgcatcattgttccccacaccgtgtggggacgcgacaaagggggatattctctttctcgaaagagaatatcccccttacacccccaagagaaaggacgaggggccttccccctcgaccccgcacattggcagtttagggcttgaagagctgcacgcgctgcgcaatcgggtgcggtgtacatggcttcgccatgaacccctgcgagtcgtcaccactcgcaaccgcgccttactaccgtgaggcgcgagtgacgtttgttcggcggcagactgcctgccgaatgcggcattgctaacgctcgccgcattgtggagtgctccggtagacggaaattaggctctacttctacaagatgggcagagcggcagcggataatagaagcaagtcaaatcgtatagcaacgctaaacgcggcaacgccgcgcgcaggcatttccattccggaggcatcaaggtcattcaagattgaaactgccaatcaaagccctttctcttggggggtgtaaggggggatattctctttctgcggaaagagaatatccccccttggtgctgcggcgcgcacgccgcattttccctccgcgctctgcgcggaaagcaaccgctcccctgagggagcgcaaaaaagaagcagcccttttgggctgccacttttttacttttcgcaaatgaccggcttttggcggtcagactccacaaatgccttggccttttcgactgcctccgcgcggggaagcttgacctgctcgccggtgcgcatatccttgcaggacacgacgcccgcggtgatctcgtcttcgccgaggaagtagacgtagggcaccttgagcttgtcggcgtagttcatcttggccttgaatttcttcttttccgtgtagatctgcgtgctgacgcccgcggcgcgaagatcggtcgcgagcgagatggcctcgctcaggtcctcggtcatcggcaggataagcacgtccgccggcgcggtgcagatgtcgctattcagaaggccctgctcgccgaggacatagaacaggcgcgtcacgccgatcgaaatgccgacgccggggagcttgcggtcagtatagtactccgcaaggttatcgtagcggccgccggagcagaccgagccgatctcggggtggtcgagcagcgtcgtctcgtacaccgtgccggtgtagtagtcgaggccgcgcgcgatggtcaggtcgaccgcgaagttctcctgcggcacgccgaacgcgccgaggtacttggcgacggtcgtcagctcgtcgaggccctggtcgaacatctcgttgcggccgcggtacttttcaagagaagcgagcacctcttcgttcgtgcccttgatgccgatgaaggcgaggatctcatccgccttttcgccctcgatggcgtagtcgtcgaccaagatcgcgcgcacgaggtcagggccgatcttttcgatcttgtcgacggtacgcatgatatcgccggacttgtcggaaaggcccagcatcgcgtagaagccgtttaagatgcggcggttgttgatgcgaatttggaatctcgacagaccgaggcgggagaagacggtatagatgatagcagggatctcggcatcgttcgtgatgtcgagctcgccgtcgccgatgacgtcgatatctgcctgatagaactcgcggaagcggccgcgctgcgcgcgctcgccgcgatagacctttccgatctggaaacggcggaacgggaaagcgaggtcggcataatgcagggcaacgtacttcgccagaggcaccgtcaggtcgaagcgaagggacaggtcgctgtcgcccttggagaaacggtagatctgcttttcagtctcgccgccgcccttggcgagcagcacatcgctcgcttcgatgatgggcgtgtcgagcggggtgaagccatagacgccgtaggacgagcgcagcacctccataaggcgctccatctgggtctgcggcgcgggaagcagctccataaagccggataaggtgtgagctttgatcgttgccatgatagtgtgtgtcctttcctaatagaatgtatggacagcgtactgtactgcggtggcacagcagcgtatcggagtggttgacagatattttacggtacggcgcagggattgtcaagcgtccgcggccgttttttccactttcgagacagtatagcattttccgcgcggaattgccatagctttcgccgcctgcggtgcaaaaatttttctttccgtcgcggacagtgttcacgaaaaatgaagatatccgccaaaaagcacgaattgcgcttgacggaactgccgctttttgttaccatagagataatatcaacgggcaagctccgaaaaccggggttcgcccgcaagcagcttccgggcagccgtcattcggcgtccgccgcggccacaccgcgcgggcaggagtcgatccgatcggatcgttgaggaggaacgttggatgtaccagagcaaaatgaaaagcgaagagaccgatcacctgttcaaggcaatcttatctttgaaaacggaggaagaatgctaccgcttcttcgacgatctctgcaccttcagcgagatcgaggcgatgtcccagcgcttcgaggtggcgtcgcttcttgccgatggtaagaccttcacgcagatctcgcagaagatcggcgtttcgtccacgaccatcacgcgcgtcaataagtgcctttgctacggggcggacggctataagctgctgctcgagcgggcaaaagaagaaaagtaaacttccgtcactttcaccagaacaggcgcagcgcgcctgttctttttgtctatattgctttattataatgccgcagaagcatatcagtataacatcacgtcatcctgatatagaagaattgactaaaatattttttggaatctgcacgaattttattgcttttgctgaaccggtatgttacaattagttcacaaatagattagagcatgggaaacagcgtgcaagaaaccgttgcccgacggtgctgttgcctaagttctgtgtctgtttttctgcgggacccctccgcaggaaacgcacgtccccttgtgcggtgtgaagcgtgctcgtcttggggagaagcggcttcccgcttcctgacgggcaagtatttttatgaagagagaggtactcatcaatggcaaacgaaaagaaagtcgcacgggagcccagttttattctggcgctgatccccattgtggcaatgatcgggttcatgctttattgcttcctcggtcattccgaatccggttatcatgacgcgcacatgcccctggtcctgtccatcgtcgtcgcctgcatcgtcggcttcgcctgcggccacagcttccaggatatgctcgccggtatgatcgatcgtctggcagcttccatggaagccgttctgatcctctgcaccgtcggtttcctggtttccagcttcatggcttccggcgcgatcccttccctgatcgtctacggccttgacctgctgaccccgaagctgttcctgcccatcggctgcatcctctgcgcgatcgtcggtatggcgtgcggctcctcctggaccaccaccgccaccatcggtcttgcgttcctcggcatcggcgccggtctcggcatccccgcccccatcactgccggtatgatcatttccggtgcgtacgtcggcgataagttctcccccctgtccgataccaccaaccttgccgcggctgttgccgagaccggcctgttcgaccacgtcaccgcgatggtctccaccaccggcccgaccctcgtcatctccctgatcatctacaccatccttggcctgaacgttgacaccagcgcctatgatcccgctgttgctcagagcattcaggacgcgttccgcggttccttcaatatctccccggttctgctcattcccatcatcgtcgttatcgtgatgtgcgtcctgcgtgtgcccggcctggtcggcattgccgcctccgtcgccaccgcaacgatcttcatgatcatcttccagtccaccgacatctacggctcccgcgccctgggcgacatcttcaacacgctgcactacggtatcggcgttgagaccggcaacgaagtcgctgactccatcctcggcaaggccaagggcatggacggcaccatgtggaccatcaacctcatccttgtcgctctcgcttacggcggcgcgctcgagcgctgcggctgcatcgagcgtctgttcggcggcctcaagcacaagatccactccgtcggcagcctgatcctcgccaccctgctgacctccatcttctgcgacgccaccatgtgcgaccagttcctcggcatcggcgttcccgcccccatctatgccgacaagtatgatgagctcggtctcggccgcaatatgctctcccgttctctggaagatgccggtaccctctgggctgttatgttcccctggaccggctgcggcgcttaccagaccggcgttctcggcatgagcccgctggtgttcttcccgtacgcgttcgtcaacctgctcaaccccatctacgcttatgtgaccgccctgctcggccgcaacatcttctgggctgacggttcctacaccaacctcttcggcaagaccaaggccggcaagcccgccggtgctcccgaagaagcccacaccaaggccatcgcgaacctcgaggctcgccgtgccgccggcaaggcccccaagatcaacgcgtaagccgctcccccgcttttacttagaaaggaatcaccgctgtgaaacaatcgcttccctgggaatctgtccctcccccgatctatcccgcacaggcgtctctcaagccgcgcaaaaagtgggtgcaggtcggcggatggattctggtcgttctgttgctgctgtttggtatttcgacccgcagccgcaacccgctgcttgccttcgtctcgctcgcgttttccgtgctgtatctgctgacgctgatgaccaaaaaggacgccgctctcacgagccgcggtctcgagatctactacgacatgcagttcaccaccaactatgagttctacccctgggaggacatcaacgcgatcgtgtgcgaggaccgcggccatgccgacatggtgcgcctgcacatcggccacggcaacacggaaaaggcgctcttcttcccgcgcgaggatctcgacgagatctacgcgttcatcaaaaagaagaatccggcgatccgcatcatggattatgccgcgcccgaaccgaagtccagcaagaagcacaagaagtgaacaactgtgacctttccacaaagaatgaagggcgccccgcttttgcggggcgctttttttatctattctgtctaattctatcactgtaccctgatagtgtgttatccaaatatggtgataacgcacaacaaagaaaactttttccggcaaaaaactattgattttgcacaaaaatgtgctatactgtttccagaacgatcctgtgggacttttccacaggcggagcgccatccacgcacgggcatgcgcggaaagtaaggggaacgcttcgacacgtttcttgcacttgggcggttcggacaaccggacacgccgaccgggtcacaccggaactttgagaaaagagaggacactaccatgatcatgaatcctaccgcgatcaagcatgtcgtcgtcgatggccacagcctgacgctcgaatccttcgtcgccatcgctcgctacaatgcgaccgtcgagctggctccctccgctctggaagccatgaagaagtcccgcgccctggccgagaagatcgccgctgagggccgcgtcgcttacggcatcaccaccggctttggcgagttccagaaggtcgccgtccccaaggagatgagcaatcagctctccaccaacctgatcctcagccattgcaccgccgccggcgagccgtatgctgacgagatcgtccgcggcatgatgctgctgcgtgccaacgctctgtgcggcggcgtgagcggcgttcgtcccatcctcgtcgagatgctgctcgagatgctcaacaagggcgtgacccccgtcgtcccgcagaagggctctctcggctcctccggcgacctggctcctctcgctcacatgacgctccccatgctcggcaagggcgaggccatgtacgagggcgtgaagatgcccggcgctgaggccatggccaaggctggcatcaagacgctcgacaccctggtctccaaggaaggcctcggcatgacgaacggcacctgcgcgatgacctccgtcggcgctctcgcgctgtacgacaccatctgcgccgcccagctcggcgacgtgatcgcgtccatgtccttcgagggcctgaccggcctgcgcaacgccttcgacccccgcatccatcaggtgcgcggccagaagggccagatgctcgtcgccgcgaacatgcgcaagctgctcgacggctccgagatcctcgacaactgccagaaggaccgcgttcaggacgcttacgccctgcgctgcatcccgcagctgcacggtgcctgccgtgacgctctcgattacgtccgcgagaaggtcgagatcgagctcaacgccgtcaccgataacccgctgatgttcctcgatgacgaggccgtcatctccggcggtaacttccatggcgagcccatggccctgccgttcgacttcctcggcatcgccgcgagcgagctggccgacgcttccgagcgccgcaccgagcgtatggtcaaccccgcgctctccaacggcctgaccgcgttcctgaccaccgaggccggcgtcaactccggtttcatgatcgttcagtacgctgccgcctccatggtcagcgagaacaagatctacgcccaccccgcttccgtcgactccatcccctcctccgccaaccaggaagacatcgtctccatgggcaccaccgctgcccgtaaggccaagatgatcctgcagaacacgcaggacgtcctcgcagacgagctgatgaccgcctgccaggccatcgacatccgccgccgcctgaacacccacggccagggcatgaccccgctgcatgaggctctctatcagcacgtgcgcgagaaggtcgctttctatgagatcgaccgtgagatctggcccgacatccgcgcggtggaagcgatgatccgctccggcgagctgctggatatcgtcaaggagtatatccccgactttgagtaagtcaaaattgcgtcgtagacgcaattttgagacctttcatttgggccatcggcccaaatgaaataggggcttcaaatattttcgctcaccgcgaaaatatttgtaaggtgtccctgcggacgcacatgtcgtccttcgggactgatcaacatcatttgcggcgtgcgcgccgcaaaataggtgcgcactgcaaattgtagtgattgtaccgagaacggcataaacgctactgaaagatttgtgttttgacacgaattgacagaatgtaaaagaaggtgtaaagttattttggctttacaccttctttttttaggaggagcttactatggaactgaacattttacgggcggacccggcggggaacattacggtgttcgtgctcgatccggtcgaaaaggcacagcgcgcggccatcgcggagaagatcatggcgatccccgaactcaaggccgagcaggtcggctacgcctgcgccgccgaggacgacgtcgacggccacatggagatgatgggcggcgaattctgcggcaacgcgacgcgcgcctacggcatgtatattgcccagcaaaagggcggcctttcctcggtcaggctgcgcgtgagcggctgcgaccatgtcgtcactgcgcaggtcgatctgaaaagcggcacggcgcgcgctgaaatgccctgtccgcgcagcgtgaagcgtgtcacggtgaatggtcacgagggcacgctcgtcgacttaacaggcatcgcccacttcgtcgttgagggcgtggagccgagcgaagggttcttccgcgcggcggagtcgatcttttccggaattgcagggcttgacgcctgcggcgtcattttcctcaacgcggaaaagcgcagcatgatcccgctcgtcaaggtcatcgagaccgactccctcgtctgggagggcagctgcggcagcggcagcgtcgcctgcgccgtcgcgcagagcgaacgcatggaaaacggcggtttttcgtgcgaataccggcagcccgcgggcgcggtccgcgcaagcgtcgagcgccaaggcggaaacgtcatcgccgcgagcatcggcggcgaggtcacgctggatgagcccatgcgcatcacgctgtgacgcggcagagtgaaatgaaagccgggcgctggcaactttcgcttttcttgttttgacctttgccgcaagcgttgaaaattcgtccaaaaatctcccgtttttttttattaaggtacgcgaaccaacgcttaattttttaaggtttttggaaaaaagaggcttgcaaaacagtttacctttctctatcgttcggctataattgattttgtcaataagagacaattctccgcttttaaatacataattatttaggaggtattccccatgaccgacattgagatcgcccaggcacatgaaatgaaaaaaatcgtcgacgtcgccgccaaggccggcatcgatgaaaagcacctcgagctctacggcaactacaaggccaagctcgacttaagcgagatccgcaagctgccccgcaaggcaaagctgatcctcgtcaccgctatcagccccacccccgcgggcgagggcaagaccaccacgtccgtcggccttgccgacgcgctcaacaagctcggcaagaacaccatggtctgcctgcgcgagccctctctcggccccgtgttcggcgtcaagggcggcgctgccggcggcggctacgctcaggtcgtccccatggaggatatcaacctgcacttcaccggcgacttccacgccatcggcgctgccaacaacctgctggccgctcttctcgacaaccacatccagcagggcaacgtgctcggcatcgacccccgcaagatcgtgtggaagcgcgctgtcgatatgaacgaccgccagctccgccacatcatcgacggccttggcggcaaggccagcggcgtgccccgcgaggacggctttgagatcaccgtcgcgagcgaagtcatggcagttctctgccttgcgaccggcctcgccgacctcaaggagcgcctcggcaagatggttgtcgcctacacctacgacgacaagcccgtcaccgcgcacgacctgaaggctgagggcgcgatggctgcgctcttaaaggatgccatcaagcccaacatggtccagacgctcgaaggcactcccgcgttcatccacggcggcccgttcgcaaacatcgcccacggctgcaactccatccaggccactgagaccgcgatgcgcctgagcgactataccgtcaccgaagcaggcttcgccgccgacctcggcgccgagaagttcctcgacatcaagtgccgcgccgcgggcttccaccccgacgctgtcgtcatcgttgcgaccgtccgcgcgctcaagtatcacggcggcgtgcccaaggccgagctcaacagcgagaaccttgaggcgcttgaaaaggggctgcccaacctcctccagcacgtcgacaacgtgaagaacgtctacggtctcccctgcgtcgtcgccatcaacgcgttcccgaccgacaccaaggccgagctcgacctcgtcgagagcaagtgccgcgagctgggcgtcaacgtccgcctgagcgaagtgtgggccaagggcggcgaaggcggccttgcgctggctgaggaagtcgtgcgcctgtgcgaagagcccaaccacttccagttcgtctacgacgtcaacgacagcattgaggacaagctcaatgccatcgccaccagggtctatcacgctgacggcgtggtcatcgccgcttccgccaagaagcagcttaagcagctcaccgagctcggctttgacaagctgcccatctgcatggccaagacgcagttctccttctccgatgacgccagcaagctcggcgcgccccgcggcttcaagatcaccgtccgtgacctcaaggtcaacgccggtgcgggcttcctggtcgccaagaccggcgacatcatgacgatgccgggcctgcccaaggtcccgtccgccgagaagatcgacgtcgacgaaaacggcaagatcaccggcctgttttaagagaaaccctgcaatatatcgcagattttacccttttgatttactgggaagaggcgggatgacccgcctcttcctgaaaccttttattctgattttaccgatccggggaggaacgctatgaagatcgcagatatgaaagttaccgagctcatcaacgaagtcggttccggcactcccgcccccggcggcggcgcggtggcgggccttgccggcggcgtcggcgtggcgctgacgatgatggtcaacggcctgacgcttgacaagaagggctttgaaaacgaccgcgaacgccttttggacgccattgccaagggcaatgagctcaaggagcgcttcatcgatgtgatgaaccgcgacagcgaggttttcgacggtctgatcgagtctcttgccctccccaaggatgatgacgcgcacaaggccatccgccgcggcgcggtgcaggcaagcttccgcagctgcacgcaggtgccgctgacaatgatggaaatttgctccgaggccatcgacctgtgcgccgagcttgtcggcacgacgaatccgaacgttgtcagcgacctcggcatcgccgcgctcacgctcaagacggccatgcagagcgcgtggctcaacgtgctcatcaacctctcgtccttaaaggacaaggcgttccgcgacgagtgctgccagaagggcgaggcgctgctcgcgcacgctgtgcccatcgcccaggagagctatgaaaaggtgctcaaggtcatcaccgaaaagtaagcgctccgccttctcgttttccgtcatttcacgccgtccgccgcgtcaagcacgcgccgcggacggcgcgcttttttctttcctgaatttttgcaatttacagtagcattttgcggattttgtggtacaataccatcggttcatattttgattgattcaaatactgcacgaaagaggcttttttcatggattttgttgcgaacggctccaaaaacgttgaaattgagacgtccacgggcgtctatctgcgccacgccatccagacgcactttgtcgagatcggcgaggattacatcgaactcgtcaaccgctacgtcaaacccctctacgaggagggcgacctgctgagcatcagcgaaaaaatcatcgccctgtgccagaagcgagtggtctaccgcaaggatatgaaaatttcgtggctggcgaaattcctcagccgctttgccatccagcacaacagcgccggcatcggcgtgggcgaggtgtgcaagatgcagttcgccatcgacgagtgcggcgcgtggaaggtcctctgggccgccatctgcgcgggctttggcaagcttgtcggcaagcacggcatcttctacgatatggtcggcatggaggtcacgggcctcgacggcttctaccccgacgtgttccccgtctacggtgactacggcatccgtattccggaaaatccctcgggcgtgtgcaacgagatctatgagaagaccggcgtgcgcgcgatgatcgtcgacgcgaacgacttcacgcgcgacatcctcggcaagggtgacaacgtgaccctcaccgacgaacagctgtgtgagatcatccgcgataaccccgcgggtcaggatgatcagtgcacgccgtttattctgatcaggaaaaaacagtaatttccccctgcgggggaagcgtgttgtttccctgctggcaggggaacggataagggagggatatctctttttcgaaaagagatatccctcccttgcaccctcccagagaaaattcacattgcaagtgagcagttcgaagaggtgcggcgcttgccgattgcacttccctgcgcgcggcagagccgcgtttagcgctgctatacgatttgcctctgcttctactatccgcagccgctctgccagtctcgtagcagtgcagcctaatttccgtctaacggagcactccacaatgcagcgagcgaagcaatgccgcattccgcaggcagtctaccgccgagcaaacgtcactcgcgcctcacgatagtaaggcgcggttgcaatcggtagcgaatagtaggggttcatggcgaagccatgtacaccgcacctgattccgcaggctgagcagttcttcgagattgagactgccaatgtcgggggtcgaggggccctcccctcgcgttctcttgggggtccaagggggccattctctcacgtgagagaatggcccccttattccgtgcagcgccaaaggcgctgcatccccctcgcacccgtgcgagaacatggtactatgtactatttcttttgcgagtacggcgtgcgctcctccgtgagccccacaagataatccacactcgtgtggtaaaaccgcgcgagcctgatgagcacgtcgctcgggacgtcgcgcttgccggtctcgtagttggaatagcagacctgcgagcagctcagatagtccgccaggctcttttgcgtcaggtcactgtcctctctcaagtctcgaatacgtcgatacattttgcttcactccatccagaattcgtgtttagattctgcaaagaagtatatgtaaaacaaaatgttatattgttctatataacaaaacgttatataattttcagagggtggttctatgacggactacaaggcaatgtatctgctcctcttcaacgccgtgactgacgcgctggagaaaatggacaggcagaactatggcgaggccagcgcactgctgattgccgcgcagcagaaggccgaagagctctacatggactcggacggcgaatagcacttgaacaacgtaaaaacggagaggcaatgcctctccgttttctcgttctgctgtttttaccggtcgagccccgtgtcgagccaaccgggcttttcctgctcgacgggcggctctgtcgtcgtgccgggatcggtcacgccggggacagtggtcccgggatcggtcgtggttcccgggtcagtcgtggtaccagggtcaacgggcgttgtcgggtccgtcggcgtggtcgtgccgggatcgacgggcgtgatggggtccaccggcgtgaccgccgcggacttgccgacgagcacgatgcggttgcgcgccttgtagttgctgctcgcctcgaacgtggacgaaatgagcttgccgtcaccggagtagatgttgcggtacgtcttgaccttgtagccggtgtaggcggtctgctcgaccttgcgctcgccgggggcgagctcgtccgtctcgacgatctcctccgtgaacgggatggtttcgagcacttcggtcttgatcttcacgtagctgtcgtcgaccttcgtgccgcgcagcgtgaccttgaggaagtccttgccgccgctggtgtagtattcggcgatgaccttgatgggatacatcgtgttgttgcggaactcaaactcgggcccaccctgcgcgaccgtcgcgtcgaggccgagtccaatatagtcggacgcgaagccgtggttcgtgcgctgcacgatctcaaggttggcgtagagcgccgcggcgtagagcgtggagctcgcctggcacgcgccgccgccgaccatatcgacggtcttgccctgcaaataaccgggcgcggtgctgtagccgttcgccgccgtgaacggcgtgacgagcgggccgtatttcatcgtttcaccggagtttaatatgtagccggtgatgcgcgaggccgtcagcttgacgttcgcgcggcggccggacgcgccgccaaccttcgtggtgtaggtactcagcacatcgcggaacaggaccttttggagctgctctgccgtgacgtccggcgtctcgaccgtggcgttcggcagctcgaccgtctcccccgccgccgcggcgttgtaggcggattcaaggtcagagagcgagaattccacgcccgcgtgtcccggcgtgaccgcgccggtctccttatcatacatcgcgttgaccttctggccgatgacggcctcgcgctgcgcgctcaggtcaacctcctgcgcggggatgacgtcgtaaacgccgccctcgctcgcgggctggagcacgatctcggacgggtctccgccgctcaaatacgcgccgtttaagtatacgccgatctggtcttttgcggtatcagtcgtcgcgcggccgtcctgcggcttcgtcacgctgaccttgccatcctctgtcacattgatggcgaactccacggggtcgcagttgatgctgtcgcacaccgtgtcgacaaggttctccatcaaatcgggcgagtaggctgcgccgaccacctgtgcagcgtcctgcggcttgaagagcgcacgcagatactttgcgcccgcggtcagaaagctgtcgttgcagccgtagacgttgtagatatgcttggcaagtccgtcgaagtcgacatactccggcatctcgtcgagcgatacgtgcgcgatctccgtgccgtccggcaggacaaagtcgacatctgtgcccttcgcctgcgcgacgctcgctttgagctgctcggcgacctgctgctcggtcatcccgccgtagttggtatcgcccatcatcacgttgggataaattttatggctggccgacgcccacgcgccaaggcccaagtacgctgccacaagcacacccgcgacgatgccgacgaccttgccggccttgcccgatgtttcacgtggaacgcgcggcggcttctccgcgcggggcgctttgggcgccttcgcggccttttccggctgcatcaggcgtttgccgccttttcttctcttcttttcctcaaaggcgccgttcatttcatccatgctggctcctcctgtttcttccgatcttccggacagggacttccctgccagtcgtttcagtataccacagtttatgagaaaaagaatcacaatttggtgacaattttgcaggattatccggcctcttttgcacgttttgggatgcggatggtcaaaaggatgccatcgtccgtgtcctcgcgctgcatgtcggcctcgacgcccgctcgctgcatcagcccgagcgagtggcggatggtgttcaaaaagatgcgcacatccttgacgatgtaggtcggcaggcgcggcgggggcgttttctgcttgagcttcaaaagctcttcgatatacgcctcgctctgcgcgacattgtagccgcgtgcggcgataacttgcaaggctttgaggcggtcttcctcgtccgtcaggcgcagcagcgcccgtgcgtgccgctcggagaggtcatgctcgcgcagaaggcgcacacaggcgggcgacaggcgcagcagccgcagcttgttggcaatagcggactgggacttccccagcctttccgccgcctgctcctgcgaaaggccgtaggtcgcgatcagccgcgcgatggccgcagcctcctccaagtagtgcaaatcgcggcgctggaggttttcgatcagcgcgagcagcgcgctctcctcctcgctcgagcgcgcgagcaggcacggcacctcgcgcagtcccgcgagctttgccgcgcgcagccgtctctctcccgcgatgagctcatagccctcgtccgtgcggcggacagtcagcggttggaggatgccatagcggcggatgctgtcgctcagtgagcgcagcgaggcctcgtcaaactcgatgcgcggctggttggggttagggcgcagcgcatcgatgggcaggtcgagcacgcggcgcgggagcagcggctttcttgcggacatttccatggatttcccctcctttttctccacttttagcacaaaaagtgtgcaaaaacgggcgaaagtcggcggagagatcaaaaaattcgcaccttgcggtgcgaattttcgttttctcatttatttcccgtcgtgcttgacgtggatacggctgatcgcgcgggcgatgcgggcattggcaatggcctgctcctgcgcgctgcgcttcgccttgagctcggcgcgcgcctcggcggccatctcttcggcgcggtggaggtcgatctcctccggccgctcgatcgtgtccaccagcacgagcgcctcgccgtgctccatcttgagcacgccctcggacacggcggcgatctgctcgacgccgtcggcgtcccgcagcgccagcttgccgggaacgaccgcgagcacgatatcctcgtgctgcgccatcaggccgtacatgccgtcgatgctcggcacggtgagtgatgtgcacgccccgtcaaaaaacgtgcgctcgggcgcgaggacgcggagaggaaaggtcttcatctcgcttccccgctttccatcttcttcgccttggcgagcgcgtcgtcaagcgtgccgacgttgtagaacgccatctcgggatagccatccatctcgccggagagaatggcttcaaagccgcggagtgtctcctcaagcggcacatagactcccggaaggcccgtgaacttttcggccacgaacgtcggctgggccaaaaagcgctggatctttctcgcgcggttgaccgtcaccttgtccgtgtcgctcagctcctccatgccgaggatggcgatgatatcctgcaattcgcggtatttctgcaaggtcgcctgcacgctgcgcgcgatgcggtagtgccgctcgcccacgatgtcctcttccagaatgcgggaggacgattcgagcgggtcgaccgcgggatataagccctgttcggcgatcttacggctcaaaaccgtcgtcgcgtcgaggtgggtgaacgtcgtcgccggggcagggtcggtcagatcgtccgcggggacgtaaaccgcctgcacggacgtgatcgagcctctcttggtcgaggtgatgcgctcctgcagctcgcccatttcgttggcgagcgtcggctgatagccgacggcggagggcatgcggccgagcagggtcgagacctcgctgcccgcctgcacaaagcggaaaatattgtcgatgaacagcagcatgtcgcgctgctcctcgtcgcggaagtattcggccatcgtcaggcctgtcagcgccacgcgcatacgaacgccgggcgcttcgttcatctggccgaagacgagcgcggtcttgtcgataacgccgctctcgtgcatctcgttccagaggtcgttgccctcgcggctgcgctcgccgacgccggtgaagatcgaatagccgccgtgctcgacggcgatgttgtggataagctcctgaatgagcaccgttttaccgacgcccgcgccgccgaacaggccgatcttgccgccgcgcggatagggctccaaaaggtcgatgaccttgatgccggtctccaagatctcaacgctcgggctctgctcgtcgaaggcggggggctttctgtggatgctgcggcgcggctccgcgccgccgatcggcgcgccgccgtcgatggtatcgccaaagacgttgaaaagccgtccgagcgtcgccttgccgacgggcacgcgaaggccgctgccttcgcccgtgacggtcatgccgcggctgaggccctcgctgccggagagcatgatgcagcgcaccgtttcggcgctcaaatgctgctccacctccatcacaaggcgcttgccgttcagctcgacggacagcgcctcgcggatgcgcggcagctcgccgtgcgggaagcgcacgtccaccacgctgcccgatacctgaatgatcttacctgtgcgcatgctgcgcctccttcttcatgtggttcttcttgctgcgcgcgccggcggagacctccgtgatctcgctcgtgatggcgccctgccgctcgtggttgtactcgagttgcagctcgcgcagcatgtcgtcctcgttctggttggccgagtccatggcagaggcgcgcgcgttctgctcggcgcaaaagctgtcgaccatcgccgagtacaaaaagcccgtgatgtacgccggcacgaccctggcgagcacctcctctgccgagggctcaaagcggatgggcttttccaccccttcctctttggcaaagtgctcatcctccagcggcagcaggcgcacggtgcgcacgtccatgtccacgccgttgccaaggtcggtgtagatgataaagagcttggagatctcgccccggtcgaagagatccaaaagcttcgccgtgatctctcgcgcgcggcggagcgtggggctctgcgcatcgtagcggaagctcttttccaccggcacgccgtggccggagaagaagtgccgcccgttgccgcccaccacaaaaaggcggctgtcggggtgcttttcaaggcgcttcatcgtctcctgaataacattctggttgtaggcgcccgcgaggccgcggtccgccgtcaccacaagataggcgtacgttcccggctgggccagatcgtccgccttgccccggtagaggtacgggctctcgatctcgcccgcgtgctggaagatctgctcgatctgcgtcgagaccgcgtcgaaaaacgggcgcgtcttggcaaggtcttctttcgcccgccgcatcttggtcgaagcgatgaggtacatcgcgttcgtcaccttctgcgtgctctggatgctcgcgatgtgctcgcggatctccttcatgctcgccatgtacctgtcacctcactttttatttggaaaaatagctttgcacaaattccttcgcgatctcgatgatctgcgactgctgatcgtcgctgagttggccggtctgctcgatggtattgcacagcgcgccctgcgtctcgccaaagtgctgcaagagcgcggggataaacgagtcaagctgctctggcacgatctcttgaaaaacatggttcagccccgcgacgagcaggatgacctgctcatactgcttgtaggggtggaactgcttctgccgcagcatgcgcatcaagccctgaccgtaggataaaagctttgccgtcgactcgtcgaggtcgcttgcaaactgcgtgaacgactccatctcgcggtactgcgaaaggtcgaggcggatggtcttggctgcctttttcatcgccttggtctgcgcgtcgccgcccacgcgggacacggacaggcccacattcaccgccggacgctggccggagaagaacaggcgcgtttccagaatgagctgaccgtcggtgatggaaatgacgttcgtcgggatataggccgacacgtctccggactgcgtctcgatgatcggcagcgccgtgatgctgccgccgcccttctcctcgctcagatgcgccgcgcgctcgagcaggcgggagtgcagatagaacacgtcgcccggatacgcctcgcggcccggggagcgctccaaaagaaggctcatcgcgcggtacgcgatggcgtgcttggaaagatcgtcgtagacgatcagcacgtcgcggcccttattcataaagtattcgcccatggcgcagcccgcgtagggcgcaatatactgtaacggcgcgggatcgctcgccgtggcgttgacgatgatcgtataatccatcgcgccgtgcgtttccagcgtctttttgagctgggcgacggagctcgccttctgtccgatggcgacatagatgcagatgacatccttgcccttctggttgacgatggtgtcgagggcgatagcggtcttgccggtctggcggtcgccgatgatgagctcgcgctggccgcggccgatggggaacatcgagtcgacggtcagaatgcccgtctcaagcggcgtgtcgacgctctggcggtcgatgatgccgggagcgggactctccactgcgcggtagccgtcggcgcggatgtctcccccgccgtcgatgggcacgccgagcgcgttgaccacgcggccgaggaatccctcgcccacgggaacgcccgccgtgcgtccggtgcggcggaccgtgctgcccgcgcagacgctcgcgtcgtcgtcaaagaggatgcagccgacgctgtcctcggataagtcctgcaccatgccgcgcacgccgccgtcgaaaagcagcacctcgccataggcggcgccctccagcccgtccacgcgggcaatgccgtcgccgacggtcagaacggtgccgacctcctgtgccatggcctgcggcgtccacgagagcaccgtctccttcagcagcgggatgacgtcgccctgcgtggcggcgagcttttcgagcgcgtctttgaactggctcaggcgtccgcccgcgctccagtcgtagacctccgcgcccacctcgaggcggaaaccgccggggtagtcatcactcttttgccaggtaagcgtcgtgccctcgccgtacttttcggcgaggaaagccagaaatcgcttctcctgctcctgcgacggacgcgcggcagagagcagtacggtctctaaatgctccgtgcgctcagccattgtccttgcgctcctccgccgtgtccaggaacttgtcgtaagcgtccgacgtgctggagagcaccagcttttccgccgcggcgctcatcagctcggaaatttcgcccttggcctgctccatcacgcgctcatgctcgcgcgcggcatcttcccgcgccttgcgcacgatctcgcccgcctgctgctcggcctgcgcgcggcgctcgtccaccgcgtgctgcaaggcttcgttcgcctcgcgctggcggcgtgcgatctcctcgtcggcgctcttgagctgcgcttcatagccggccttcgtcttctcggcctcggcaagcacggccttggcgtcctcgtccatcttctcatagtgcgccttgcggctgtccataaagctcttcacaggcttgtagagcagaaaatacatcgcgccgaacaggatgacaaagttcagcgcatgcagcaaaatttgctgcagattgatattaagcggcattcaaagcccctcctttttgggagtgttcttcatcaaaggacgaagataatgaggatcgctacgatcagggcgtaaatgatgaccgtctcgataaacacaaggcccatcatcatcgtggttctgatctgacttgtggcttcgggctggcgggccatggcctcgctcgacttgccgacggcaatacccatcgccagcgcgccgccaaggcacgcaatgccgatcatcacgcccgagcccatcgccttggcggaggtcacgtcgttgtcgttgctgccggccgtgacgctcacggtctcggtcacgttgctgtcgctgccgctctcgtttgcggcgagggcggggatggtgcagatcatcagcgcgcacagcagcatcatcagcgctgcaaatttcttcatcgttttcatggcaaatttacctctttcttcaggcagccgtttcgctgcgggatttttttaccttcttggccttgggcttcttctcgtgcttttcggtcgattcgccgtagaacgtcgacaccagcatcgttaaaacatacgcctggatcagcgcgtgcaacagcgtgaacatcacgcccacgatgaccggcagcacataggaaagcgccgcgtagtaatacacaagctccgtcacgagcgcgccggaaagcagcgcgccgaagagtcgaaagctcatcgagatcggcagcgagaaatccttgagcgcgtgcaaaaatccgcccacgcccgcggcgatcagtccgccgaagaggatcacgccgtagctcatcacgcccagcgcgatcgccccgttgatatcggacagcggcgcgggcaggctgacggcgtggcctgatgtggtcaccacctgaatgccgagcagctcaaagagcgtgctgacaaagatgtaaacaccggcggtgaagatgtacgcccgcaggaatttattgcggtgcgggctgctgccctcggccaggccgtcgaacatgccgacgatctgctctaaaacgagctggaacctgccgggcacatatttgaattttgggatcacaaaaagccggcacacaagggcgaatactattaaaatacccgtcacgatgtaggcggagatgagccccgggttcacctcgatcaggccaaacaggctcaccttgttctgctcgtgcagcaccgcgtcacgcatgacctcctggatcggttcgctctcgccgcctgacggcgtgagcaaacatccggccagcagcgccagcacgatcacggcgaacacgatcagctcgcgcgttcgctttttcttatccacgcgccctacccccttttgtttctatcatccaatttctgcttgggatgcagcacttatttataccacctgcacgcaggaaatgcaagtcttccttcatgatcaaccgccgctttacagcatcttttcgtcttcttaacagagccctgacccctcccctttttcttcaataaatagagcagcggaaggagacagtgctgcccccttccgccgctctattccacttttctcgttatcgtcacaatacgaagatgatcaggatggctatgatcagcgcatagatgatgaccgtctcgataaagacaagacccatcatcatcgaggtgcggatctgccccgccgcctcgggctgctcggccatgttgttcgccgccttcgcgaccgaatgcgccatgcccagcgcgccgccaaagcacgccacaccgataagcgccgccaccgcccagatcttgcgcagcttgacggtattttcgttcgctcccgcttcggcagactcttccacctcactcagcgtttccggggtctccacgtttcgctccccgcccgcggcggccagcgccgggaccgtcagcgcgcacagcagcgccagcacggcaaacagcgaccaaattcgtttcatcattcggctccttaacgcaaaaatgcagtttctttgcgaaatctttataacgactatataccacccgtgcgccgatggcaagtcttttttataaaaagcacaaaaagtaggatcctctcccttaatttttcgttttttctttctcttgagagtagcattttccgcgcgtttctgctatcgtgtagaaaaacaaatcacgttgagaggaaaatactcatgttctgggacaacgtcgcgggggtctatgacctcttcgccgacatctttaataaagaaacgcacaaggcgctcattgccgccgtcagctcccgcattgcgccggacgatgtggtgctcgaatgcgcctgcggtacgggccttctcaccggcgccatcgccaagcgctgccggacgcttctcgcgacagacttttccgccaacatgctcaagcgggcgaagaagaaatacggcgcgctgccaaacgtcacgttccgccaggccgacatcctgcatttagacgagccggacgggcagttcgacgccgtcgtcgccgcgaacgtcatccacctgctcgacgagccgtacaaggcccttgccgagctcgaccgcgtctgccgcagcggcggcacgatcatcgtcccgacctatatgaaccgcagcgagcagggcaagacgagcggctttgcctcgaccgtcggcaaggcgggcgcggacttcaagcgtcagttcacgttcgacacgtataagcagtttatcgccgcggcgggctacgacgatgtcgactacgcctactgtcccggccgcgtgccctgcgccgtcgccgtgatccacaagccgtaaaaagcaagaaaaaaggctccgcagagtattctgcggagccttttttacattttgtattcattttctcttctgccggcggatgtcttcgccgaaaaagagcagcatttgatactctccctgcaatcttgacagcaccggcgcgccgtagcgccgcccgagctcgtcggggctcaggttcgtggagatgacggtcttcttccccgtgatgaggcgcgtgttgacgatctgatacatcgcgctgtggacaaagctcgtcatcagttcggtgccgaggtcgtctaaaatcagcaggtcgcagccgagcgcgcggctcacggcggtgtcggcgttctcgccgtcgtcgcggccgaacttctgcgcctcgaagcgggcgaagatgtgccccgccgtgtcgtagactacgctgtggccgctcgcgctcacgacgcgcgcgatagacgcggagaggaacgttttccccagtcccgtgccgccggtcagcagcaggttgccgctcttgggcgaaaactcgtgcgcgtagtcctggcagatgtcgtacacgcgctccatgttcgtgcgcggcgacacgccgaggtcctcgtccggcacggacgaatagtagtcgaagttgaaattttcaaagcactgcgagccgaggtccaaaaggcccgaaagctccttgttctgctctctggcgtagtagccgcgcaggcacgagcagacctcgctgccgagaaagcccgtgtcgttgcagcgcgagcacttgggcttttcctcgagatagtcgcccggcagtcccaggcgcgtcaggagaaggcgcttttcctgctgcaagttgaggttttcctcccgcagcgcctcgatcgccggacgcgggtccgtcccgcggcgcaggccggaggcgatgatcttcgccatcgtgtgcgacaactcgcggtcgatctcctcaatgcgcgggcacttggtgtacaccgcgcgctcgcgcgcgcgaaaattctccgcgcggcgctgcttgtcctcgtcgaagcgcgccagcgcttggcgcatcagccgcccatcgtaagacatccttctcccccgctttcgttactgattcaaatattccttcatccaggcgttgccgccggtggtgttctttttcggcttgctctgctccttggcgttctcggccttcacttcggcgagcgtgtgcaggcccttttcgtgccagcgcttcaaaatgccgttgcagtacggccagcggaattcgtggcagtgcaggatcgtacggtcgtaggcctcggacaccgtctcggccgggaagcccatctccgcccacgcggagagatacttttcctcgctcggcgcgctcgcgcggccctgcatttgcagcgctgccatgtactcaggatacctgccgcgcagggattgctcgcgcttcatgtactcgctggccttttcgatggaaaagagctccttgcgcgcccagacgtagccttccttttcgatctcgcgcatgttgggcagccgcccctcgccgaactgctgctcctttttcgcgatgcagtagttgacgagcgtgtaaacgacgtccgcgggcagacccagattttcgtacagccctaacagcttcttgaccgacggggtcgagagcgggccgagcttgtgctccacctcgcgcagaaggcaggcgaagcgcccgtcgccctccagctttcgcgcgatgtcctcgcgcgtgtactcgggcggctcgctgagctgctggggcggcggaaggggcgcttcctctttcttctccggcgcgccgacgagcttcatctcgtagagcgcctgctccgccgcgcgaagcctcgtttcgtcccacttgagctcgcgcgcgagcttgccggaatccgccgcgccgcgcgcatgcaggatggcgaggtacagcagcgccgcgtcgccgctgccacccgcgatcaatcgcttgaccgtcgccgacgagagcgtgatgttctcctcggtactcaaatgcagcacatagcctgccatgttccccgccccctttcgtccattttcgattccattattctacatgaaattttcccgttcgtaaacatgaaattttttgcttcccccttttcacattttcactcccgtgttatactgttagagattatatgggtggaatttgcccttttttgtgcaacgccgaagaagaaaggagcacacaatcatggaaaaccgcatcaccgtctctatttgcgacgaggaatacacctttgtcgccgaggaagccccctcctatatgcagaaggtcggctcctacgtcaacgacaaaatgagcgagctgctcgacgctgccaaggtcggccgcacggacgccgccgtgctgaccgccgtgaacatcaccgacgagctcttcaaagagcgcgaggccggcgacgcgctgcgccgtcaggtcaagcagtacctcgacgaggcctctcaggccaagaacgaggtcagcgagctcaagcgcgagatcttcaagctccagcagcagaaaaagtaagccttgacgacagagctattagcgcccgcgggcgggcaggaggcgctcatcgccgccgtgcagagcggcgcagacgccgtgtatatgggctttggcgcgttcaacgcgcgccgcagcgcgaggaacttctccgatgaggaattccgcgcggcggtctcttattgccatttgcggggcgtgaaggtctatctgacgctcaacacgctcgtcaccgaccgcgagctccccgcacttgccgcggaggcgcgcaccgcgtcggagtgcggcgtggacgcgatcctggtgcaggattggggcgttctgtcgacgctgcaaaaaatcattcccgacgtgccgctgcacgcctcgacgcagatgagcctgcacacgctctcgggcgttcaggaagcggcaaggctcggcatgacgcgcgcggtgctcgcgcgcgagctgaaccgtgaggaaattgccgagatctgccaaaaaagccccatcgagatcgaaacttttgtccacggcgcgctgtgcatgtgctacagcggccagtgcgagatgtctgccgtcatcgggcggcgcagcggcaaccgcggcgcgtgcgcccagccctgccgcctgccctacggcttttccggcaaggtggacggccatccgctgagcctgaaggacgcgaacctcgcgcccttcgtgccggagatgatggacatgggcgtcgcgtgcctcaagatcgaggggcgcatgaagcgcccggagtatgtcgccgccgtgacggaaatctacgcgcggctcctgcgcgagcatcgcacgccgacgaagaacgagcagaaaaagctcgccctcgccttctcgcgcgacggctttaccgagggatactaccgcggcgtgcgcggacgtgagatgttcggcacgcggcccgaaaatgcaagatggcccgaggactggttcagcgagattcgcgcgcgctatgaaaaggaaaatctgcggctcgtgccgctcacattggaatgcaccatccgcgccggtcagccgatgaccctgacggcggaagatgcagacggccaccgcgtgaccgtcaccggcgcagtgcccgaggcggcgcgcagccgcgccgtcaccgcggaagaggtcgaaacgcgcctcaagaaaaccggcggcacggcgttttcggcggcgcagtgcgccgtcgcactcgacggtggcctcgccgtcagcgcgggcgcgctcaacgccctgcgccgtgaagcgctcgcgcagatggaagcgcagcgcaccgctgtgccggaacgccgcgtattcgactttgttccgccaacaatcgtcaaaaacagcgcggacaagccgcttttgaccgtctccctccacagggccgagcagctgagcgaagagcttgtcgccctcgctcccgcgcgggtgtatgtgcccgtcgagctactggcgcagcttgacctttcgccacatctcggcagaaccgaatttttcgcggtgctgccgcgcatctaccgcacacaggacgagcctattttgcgcgcgctgctcgaggacgccgccaaaaaaggcctcacgggcgtgtcgctcgccaacctcggccatctttcgctcgtgcgcggactcgatgcagcgctccacggcgactgggcgctgaacgtctataactccgccgcgctcgctttctggaaagaacagggactttcgagcgcgtgcgtctcgttcgagctgcgcgacgcgcagattcgtgacctcagcaagtgtctcccgtgcgaggccatcgtctatggccgccttcccctgatgctcacggaaaactgcctgaatgcgaacgcgttcggctgtcgatactttaccgagcgccccgcctccgttccctgcgacggcgcgtgtgcaagcgcgccggagctgaccgaccggcgcggcgagcacttccccgtgctgcgcgcgtggggctgccgcagcgagatcgagaacggaaagattctttatctcgcggacaaatcgaaggactggcagtcgctcggactgcgctttgcgcagctccgcttcacgactgagagcgccgccgagtgcgtccgcgtgctgcgcgcgtatctgggcaagacggtcgaagcgccggagaatatcacccgtggtctcttctaccgcggcgcagaatgaatccaatttgtaataattcttattgattctacattttatcatcaatttgtgaggcatatcatggcaatcgttttggcatcccagtccccgcgccgtcaggagcttttacagcgcatcggcgtggaggacttcaaaacgctctcgctcgacattgacgagagctatccggaaggtctttctcccgaggacacggtgcgctacattgcaaagaaaaaatgcgacgcggccgccgccctctgctctcccgacgatctcatcatcacggcggacacgatggtctttttggacaatgaccgcctcggcaagccgcacgatgaggaggacgcgctgcgcatgctgcgcgagcttgccggccgcggccacacggtctgcacgggcgtgagcgttcgccgcggcgcgcaggaagagcgcttcgccgtgtccacgcgcgtcttcttccgtccggcgacggacgacgagatccgcgcctacatcaagaccggcgagccgatggacaaagccggcgcctacggcgtgcagagccgcggcgcgctcttcgtcgagcgcatcgacggcgactttttcaacgtcatgggtctgcccgtcgagcagcttggcttagtgctcgcgcgcttcggcgtcaagctcctgtaacctctcccctgccctacgatgaaaggagggtaagccttgaaagaatttttccgtcagcacgggctgcgcattctggccgtcgccgcggcggtcgccgtggcattgagccttttgacctacttttcctcgacgtcctcggtgctcgaaaacatcgcgggcgtgctgacgtacccgttccgcgccgccgccaccgccgtgagcgactgggcggccgacaagcgccagtattacgaggacacggccgcgctcaaggaggaaaacgcagcactcaaaaaagaggtcgcggaccttcgcgcccagcagcgtcaggcgcaggccgacagcgaggaaaataagctcctgcgcgagcttttgaagctccagcagcagcggcgcgacttcacattcgtctccaccgccgtgctcgcccacagcgagagcagctggacgtcgtcgctgtctctcaaccacggcaccgatcaggacatcgccgtgggcgactgcgtcgtcagcgccgaggggtatctcgtcggcgtcatttccgaggtcggcctcaactggtcgacggtgctgaccgtcatcgacacggacactgagctcggcgcgcgcatcttccgcaccggcgaggtcgccgtggcggagggcgacttctccctgatgggtcagggcaaattaaagctctcgtacctcacatcggacgacgaggtgctcatcggcgaccagatcgtcacctcgggccttggcgggtactacccgagcggccttgtcatcggctcggtcgaatcgctccagaccggcgacgacggcctcgcccgctacgcggtcctcgcccccatgatggactttgccgccctgaccgaggtgttcgtcatcacggactacgacattgtcgactgagggaggctcgcatgaatctcacccaaaccaccgcgcttaagtggacgttttacgcgctcgccgccgcggcgctctttttcctgcggcggctgcttctcgggtcgatgacgtttttcggcgtcatcccctttctgccgcccgtcattttggcggtcatggcatcgttcgagctgccgcgctcgtccgtcatcgcgggcatcgtcttcggcgcactgtgcgaccttgtgctccccgcgccattcgcgtgcttgtacacgatcgcgttcacgcttgcggcgctgcttatttccaccgttgtcagcaatttgctgcagcagggctttgcccgtgcgctgctctcgaccgtgctgacatttctgctcgttgacctcttgcaggcgttcgcgctgctgccgcgcagcggctcgaccgccattttgtcgatgctgcacctgtttgcgcgcgaaacggcgctctcgtgtctgctgctcgtgccggtgtatccggcgctgcgcgccgtgcgtcgcgccttccccgactgattttcccattttcccccaagcctcaaggaaaggaggccgctatggattccaaacgctttacccgccgcctcgttgcgctcggcgcggcgatgtttctctgcgcgctcgtgttcgtcgtcacgctctttgacgcgcagatcgtcaacggcgacgattatctcgcccagtccatccgcacgaatgccaagtccgagactgtcaaggcttcacgcggcgtcatcaccgaccgcaacggcaaggtgctcgtgtcgaaccgcgcggtctacacgctgaattttgattcctcgctcgtctcttccgacgagctcaacgacgcgctgctgcgcgtcatcgaactgatgaacgcgcagggcgtcgaaattaaggacacgctgccgctcgccaggacctcgccctacgcttacgacaccgcgaacggcagcgcgaaaacgctcgtcaaatacctcgtctcgctcaagtggatcaatgaaaagaacgtcggcgatgacggtctccccaccactctgacgggctctgcgctgtatctgaagctgcgcagcgagtacgggatcgacaaagccctgcccaccggcacggtgcgcacgctcatcgggctgcgctactccctcgcctccgccaagatgaacggctccacgaccttcgaatttgcgagcgacgtggatgtttcgctcatttccctcatcaaggacggcaactatgccggcgtgcaggtggatacctcgtccgtgcgcgtttacgagaccgactacgccgcccacgtcctcggctacaccggcagcattcaggactgggacgattataaggataaggacggctacacgctcgcgagcaccgtcggcatctccggcgtggaaaatgcgtttgaagactatctccacggcagcgacggcaagcgccttgtcacgctcaacgaatccggcaagatcaccggcgagctctactctgtcgagccgaagcccggctccaccgtggcgctgacgatcgacatcgactttcaggctcaggtggaggaggcgctcaaaaataccgtctcttccatgacaaaatccgacggcatcgaccgcggcgcggccgttgccgtcgtgcaggtcggcacgggcgacgtgctggcgcttgcgtcctatccgacctattccctctcgacgttccgtcaggaccttgcagagctctccaccgatcccctgcagccgatgtggaaccgcgccacgcagggaaaatacgcccccggctcgaccttgaagccgctgacggccatcgccgcgctcgaatccggcgcgacgaccgtgcgcgagcgtatctacgactccggcaagtggacgtaccccggctactccgcgagctacacctactgctggaagcgcagcggtcacggctcgctcaacgtccgcggtgcgatcatgaactcctgcaactatttcttcgccgaaatgggctaccgcatgggcatggacacgctgcgcgagtattacgccaaattcggtctcggcgcgccgaccggcattgagatcggcgacaccgcgggtcgcctcccctcgcagaacgaaggcgagaaccttgccccgtgggcggcgttcggtcaggcgaaccaggaatactccccgctccagctcgcaaattacatcgcgacgctctgcggcgggggtgaccgctacgccacgcaccttttgaaaaacgtccgctccagcggctccggtgcgctcaaatacgtttacgacgccgagccggtcgaaagggtcgaaatgagcagcgaaaacctctccgccgtcctcgccggtatgcacgacctcgcgactgacggcgcggtgtcgcagtatttcaaggactgtatcgtcgacgccgcggccaagaccggtacggtccagactggcgacacgaagaacaacaacggcgcgttcgtctgcttcgccccctacgacgatccgcagatcgccgtggccatcgtcatcgaaaagggcggctccggcgcagcgttggcctccaccgccgtgcaggtgctcaacgcttacttctccaacacgtccgcgtcctccgcgatcacgggcgaaaatacactgctgggttaagcgcgccgtttcggcgcgcttttgcctgtttcagccgctttatttggcagaaaggaatgtgttatgtcaactaaatggtttgatccgcgcgatcttctcttcaaatctccctttggcgcggtgccctgcggcgccgatgtctcgttctgctttcgccccgagcgcggcgcggcggtcacgcgctgtgagctgcttgctcacggcgagtttgccgaccaatggacgacggtggagcttactcccgcgcaggaggacggccacgtcgtctatcgcggcatcttcaccgcgccggatgacgtggagctcgtctggtaccacttccgcctctcgtgggcggacggcggcacgagctgctacggcaaaaacggcctctgcgcgtgggacgcggtcgagccctggcagctcacggtctacgacgacacacacaaaacgcccgcgtggttcggccgcggcgtgacgtatcagatcttccccgaccgcttccgccgcgctaaatctcgtgatgttgcaggccttgttggcccgcgcacgctgcacgaaaattgggacgagcttcccgaataccgcccgaacgccgagggcgagatcacgtgcagcgattttttcggcggtgacttgcaggggatcacggaaaagctcgactacctcgcctctctcggtgtgacgacgctctacctctgcccgatcttcgaggcctcgaccaaccaccgctacgacacggcctgttatgagcgcattgacccgctgctcggcgatgaagcggacttccgcacgctctgcgcggaggcgaaaaagcgcggcatctacgtgatgctcgacggcgtcttcaaccatacggggcgaaagagcgtctatttcaacgccgacggcttttacgacgacctcggcgcggcgcagggcgagcagtcgccctactaccgctggtacaacttccacccattccccgacgagtacgacgcctggtggggcatcaagaacctgcccgcagtcaacgagctggaaaaaagttacgttgactacatcatcgagggtgataattccattatcaagcactggctgcgcgcgggcgcatccggctggcggctcgacgtcgccgacgagctccccgacgagttcattgccaaaattcacgcggcgatgaacgaggagaaccccgacacttatcttctcggcgaggtctgggaggacggcacgacgaagatcgcctactcccagcgccgcaagtacctgctgggccgcgagacgaacggcctgatgaactacccgtttcgcacggcgctgatggcctatttgctcggcggcggcgcggaatacttccgcgacagcatggaggagctgcgcgaaaactatcctgcgcccgcgttctacggcgcgatgaatttcctctcgacccacgacacgccaaggcttttgacgattctgggcctcacctcccccgcgccgcagacgcgcgacgagcgcgcggtctatcagctcagcgattccgaccttgcgcgcggcatgtcgctcctcaagctcgcggctctgatcctctacaccttccccggctcgccgatgctctactacggcgacgaggccggcatgcagggctttgaagacccgttcaaccgcggaacctacccgtggggacgcgagaatgccgaattggtgcaatacttccaacagctcggcgcgctgcgcaaatcgcacgaggcgctgcaaagcggcacgatcgtctaccatgccgcgcagggccgcgcgctggcgttctcgcgccgcacggagcacgaccactgcctcacagcagtcaatgcgggtgatgagcccgtcacgctcacccttccgtgggacggcacgctcgccgaggacgccctgtcccatcaggagttcttctgcggcaacggcctgcttcgcctgacgctcgaaccctacggtacgatgctgctgacccagccgcaggagtgatttgtttcacgtgaaacactgatttagcgtcatggtaaaggtcaacacctttaccatgacctttttctatcctcagcactgccccagcggtgatacctcatcaccggcccaagcagaagcaaatcgggacgtaaaggtctgcgccttgtcatgtttcacgtgaaacaaatttgcaaaatttaagcttccctgttgaaattgagccgttttgtgctatactgaacaagaatgaaaatggatcaatgcttctatgactaaggtgggtgtttttttggctaaaatcgttgcaatcgtcaatcaaaagggcggcgtcggcaaaacgacgacctgcgtcaacctgacctcctccctcaaggagaaaggcaatcgcgtcctgctgtgtgactttgacccgcaggccaactccacctccggcatgggtgtggacaaggcggcctcgcgcggcgtttacgacgtgctcatcaacggcgcagacgtcacggccagcgtggcgcacacgcgttacggcgacgtgctcccctcttcaaaggcactggcgggcgcgggcatcgagatgatcgaccgcgaaaaccgcgaattcctgctcaagcaggcgctcgacgttctctcgcccaattacgactttatcctcatcgactgcccgccgtcgcttgaactcttaacggtcaacgccctctgcgccgcgaattccctgatcgttcctgtgcagggcgaatatttcgcgctcgaaggcctgtccgacctgatgcacacggtccgcatggtgcgccgcagcctgaatcctggcctggagctcgaaggcgtgctgctgacgatgttcgacgggcgcacaaatctcgccctccaagttgcggaagaggtcaagcgctacttccccggcaaggtgtattcgaccgtcatcccccgcaacgtccgcctttccgaggcaccgagccacggcaagccgatcaactactacgaccgcacctcccgcggcgcggaagcgtacagcgacctcgccaacgagtttttgaagcagaaccgctgatacattaaatataagggcgcattccgcccgcttcatcccacagaaaggagaagtttccatggcaaatgcaaaccgcgggctcggcaaggggctcggcgcgctgctgggcgacgccgccctgcgcaccgacacgtccgacaacctctacctccccatctcgcagatcgaaccctacgccaatcagccgcgccgccacttcgatgaagaggctctgcaggatctggccgattccatccgcgagcacggcattatccagccgttgacggtccgccgcctttcttccggctactatcagatcatcgcgggcgagcgccgctggcgcgccgcgcgcatcgccggtcttgccgaagtgcccgccatcgtcatcgaggcggatgaccgcaagatgaccgagctttcgctcatcgaaaacctccagcgcgaagaccttgaccccatcgaagaagccgagggctacaaaacgctgatggacaactaccatctcacgcaggaggaggccgccgagcgtgtcggcaagtcacgctccgccgtggcaaacagtctgagattgttagggctttgccccgaagtgcggcaaatgctgcaaaacggcgacctctccggcggtcatgcccgcgcgctgctgccgctcaaggccgatttgcagctcgacgcggcaaacctgatcgtcaagcagggcctcagcgtccgccagaccgaggcgctcgccaagcgccttgctaaccccaaggaagagcgcaaacctacgaacgacgagctcatcgccgagagctacggccgtctggccgcgcaggagctcagcgataagatcggccgcacctgccgcatcgtgtccggcaagaaaaagggccgcatcgagctcgactattacggcatcgacgacttaaacgacctgctcgaagcgctcgccgccatcaaacgcagaaagaacggagacgaataaccatgtccgatttgattcacgagggtcctaaggacccgaacaagccgcccgtgcccggcgaggaaaagcccaccaccgagcgcgagcgcatgaaaaaagtatatacttacgttgcgatcctcttcaccgtggcatttttgctgattttgtggacattttttatgaatcagcgcagcatcaacgagatcaaggacggcaacaccgccctgcaaagcaccttacagcagaacgactcactggaagcgcacattgccgaacttgaagagcagctcgccaacagcgaggaggacaaaaaagcgctcgacgagaccgtcggccttcagtccaaccaactgcgtgcgctcgactggctgcttgagatcgaaaacgcctacaacaccggcgatctcaacgccgcgaaagacaacatccgctcgttcgaggagaccggcacggtggaattcctgcccaaggagccgctgcgtaccggtatcaccggcgacgacgccccctcccccgccgcgcgctaccagtccattgtggacaagctgtttccggacggtgtaaaataagaagtcaaatggtcatttactttacaacgataacgaggtaaatcattatgctggatatgaaattcctgcgggaaaatcccgatctggtcaaggaaaacatcaagaagaagttccaggacgaaaagctccccctcgtcgacgaggtcatcgagctcgacgccaagaaccgcgccgccatcaccgaggcgagcgagctgcgcgccagccgcaacgccctttctaagcagatcggcatgctgatgggtcaagcgaagaaggacccgagcaagctcgaagaggctgaaaagatcaaggcgaccgtcaaggcgaacgccgaccgcctcaccgaactcgagaaacttgaagaggagtacgagcaacgcatccacaagatcatgctgctgatcccgaacatcatcgacccgagcgtccccatcggcccggacgacagctgcaatgtcgaggtcgagcgtttcggcgagccgaaggtccccgattttgaaattccctaccacacgcagatcatggagagctttgacggcgtcgacatggacgccgcgggccgcgtctccggcgcgggcttctactacctgctcggcgacatcgcgcgcctgcacgagggcgtgctcgcttacgcgcgcgactttatgatcgacaagggcttcacattctgcgtcccgccgttcatgatccacggcaacgtggtcgagggcgtcatgagccagaacgacatggacgccatgatgtacaagattgagggcgaggacctctacctcatcggcacgagcgagcactcgatggtcggccgcttcatcggcgaaattctgcccgagagcagccttcctcagacgctgacgtcctactccccctgcttccgcaaggagaagggctcgcacggcatcgaggagcgcggcgtttaccgcatccaccagttcgaaaagcaggagatgatcgtcgtctgcaagcccgaggacagcatggactggtacaacaagatgtggaagtggagcgtcgagctgttccgctcgatggacatccccgtccgccagcttgaatgctgctccggcgacctcgccgacctcaaggtcaagtcctgcgacatcgaggcctggtccccgcgccagaagaagtacttcgaggtctgctcctgctcgaacctcggtgacgcgcaggcccgccgcctgaaaattcgcgtcaagggcgaggacggcaagatgtacctgccgcacacgctgaacaacaccgtcgtcgcacccccgcgcatgctgattgcattccttgagaacaatctgcaggccgacggcagcgtgctgatccccaaggtcctccagccctacatgggcggcaagaccgttctcattcccaagaagtaaatccaaaccgcaatattattccgtttttatacgatcagttttcgtttttgcacattttcagcaaagaggtgcttcccatgaagaagttttttgaagagttcaagaccttcgccatgcgcggcaacgtcatcgacatggccgtcggtgttgtcatcggcggcgcgttcggcaagatcacgaactctgtcgtcaacgatatcatcatgccgctcatttccatgctgaccggcggcatcgacttttccgcatggaagtgggtgctcaaggaagcagtcatggagggcaaggaggtcatcgaccccgagatcgccgtcaactacggcaacctgatcgccgtcatcctcgacttcatcatcatcgcgttcgccgtgttctgcatggtcaaggccatcaacaaaatgcacgacaagctctcgaagcccgccgagcccgagcccgaaaaggcccccgagccgacgaaggaagaagttctgctcaccgagatccgcgaccttctgaaggagcagagcaaatgaacgagcttctcttgcagggcctcagcgagctggggctggatgtaagccgggcagaaacgctcgagcgcttctcctccctgctgctggaaaagaacgaggtgatgaacctcacggccatcaccgagcccgacgccgtcgcgcagctccacctgctcgacagcgcggcgctgctgccatttgtcgatctgacgggtaaaaccgtcgtcgacgtcggcactggcgcgggctttcccgggatgccgctgcgcattttaaaagacgacttcgacctcacgctgctcgactcgctcggcaagcgcgtcaactggctgcaagaggtctgtgacgagctgcaattaaagcgcgtcgcctgcgtccacgcgcgagcggaggaattcgccatgcagcaccgcgagcagttcgacatcgccacctcgcgcgccgtcgcgcagctctcgatcttatccgagctgtgcctgccgctcatcaaggtcggcggacagttcgtcgccatgaagagcgtcgacaccgaggacgagatcgccgcggcgaagagcgccatcaagacgctcggcggccacatcgtcaaggtcgaggactacaccatcccgacgagcgacgtcgtccaccgccttgtcatcgtcgaaaaggtctcccctaccccgcgcgcctatccgcgcgccttcgccaagatcaaaaaagccccgctgtaacgcatcaaattcacaaaaaggaggtacgagccttgtcccaggtcatcgccgtcgtgtccggcaagggcggcacgggaaaaacttcattcacgacgctcaccggcatggcgctcgcgcagctcggcaaaaaaacgctgctgctcgactgcgacatcggcctgcgcaatctcgacctctacctcggcgtatcggaccgcgcgctcatggacttcaccgacgtgatcgccggacgcacgacactcgctcaggccgtcgtgcgccacccgctctacccgaacctgtatctgctcaccgcgcccgtgagcttcggcgtgcgcctgccgagcaagcgcgagatgcagcggctcatcgacgagatccgccgccatttcgacttctgcctcatcgacgccgccgccggcatcggcgaagccttcgcgcttgccacctgctgcgccgaccgcgccgtggtcgtcaccacgaacgacccctcgagcctgcgcgacgcgcagcgcaccgtgatggagctgcagcgcttcccgagcggatacctgcaccttgtcgtcaaccgcgtgcggcgcaagctcttacagtccctccacaccacgatcgacgacgccatcgacgccgcgggtcttccgctgctcggcgtcattccggaggacgagaatgtccctgccgttttggggcgcggactttcccagcgcctcaagtatcgctccggcgcgctctgcgcctgcgaaaacatcgcccgccgcctgtgcggcgaacgcgtgcgtctgatgcggctgtagcaccggttcacaaaggcaaacacgcttttcccgcaaacatcttttcaaagcctgcttgcccttgtcaaccgatgaaagtgccgctacaatagaaaaattcacatcagaaaggattgtgacactacatgaacatcgctctcatggcacacgacaacaaaaaggaactgatggtccagttctgcacggcttacgccggcattctgtcccgtcacactctctgcgccaccagcgtgaccggtaagatggtcagcgaagcgagcggccttccgatccacctgttcatggcgcgcatccacggcggcgccgagcagatcggcgcgcgcatctcctacaacgagatcgatatggtcctcttcttctgcgaccccgccaacccgcagtataacgacagcctgacctatatcaccaaactctgcgaccagaacaacattcccttcgccaccaatctcgccaccgccgaaatgctcatcatgggccttgcccgcggcgacctcgactggcgcgatatcgtcaacccgaagacgaagcctttcaccacctgagcgtaaaatcaggcaagcttcaatacgattagtaattttcaatttttaatatacaaacaggagtggattttaccatgatgcaatcccgtacacacaactgcggcgagcttcgcgcgcagcatgccggtgagcacgtcaagctcgtcggctggatggagaacgtccgcgaagtcggcggcagcctcgcctttgtggtgctgcgcgacttctacggcacgacgcagatcgtcgtcgagacgagcgagctgctcgcccagattaagggctacaacaaagagagcaccatctccgtcgagggcaccgtgcgcgagcgcgcgagcaagaaccccaatcagcccaccggcgacattgaggtcgttcccgagaagatcgagctgctcggccgctgccgctacaactccctgccgttcgagatcaaccgcagccgcgaggcggacgagacccagcgtctcaagtaccgctatctcgacctgcgcaaccccgccgtcaagaagaacatcatcctgcgctgcaacgtcatcgccgcgctgcgcaaggccatgatggagcacgacttcctcgagatcaccaccccgatcctgacggcctcctcccccgagggcgcgcgtgactacctcgtccccgcccgcaagcaccctggcaagttctacgccctgccgcaggccccgcagcagttcaagcagctgctcatgacctccggctttgaccgttacttccagatcgcgccgtgcttccgcgatgaggacgcgcgcggcgaccgcagccccggcgagttctatcagctcgacatggagatggcgttcgcctctcaggaagacgttttcgccgtctgcgaggatgtcctgcccccgatctttgcaaagtttggcacgtatgacatcgcatctcagcccccgttccgccgcatcaagtacctcgacgcgctggaaatttacggctccgacaagccggacctgcgcatcgacctgaccgcgacgaacgtctcctccctctttgaaaacagcgcctttgaggtgcttgcaaacaagaccgtcaaggccgtcgccgtttcgaactgctcgctcacgcgcaagcagatcgacaagctcctgaccgactgcgaggtgcaggcaggcgcgaagggctactggttcaaggtcgacgaaaagggcgaccttgccggcggcatcgcaaagtttgtcgacaaggaagccgccgcgaagctcctgccgctcaagcccaacacgctcgtgctcgtcgcgggcggcgagctggccaccaagctcgtcggcgtgatgatcaagacgttcggccccgcgtgcgagggtcacatggacaaggagcgctacgagttctgctggatcgtcgacttcccgatgtatgagatcggcgacgagagcggcgagctcgagttctgccacaacccgttctccatgcccgccggcggcctcgacgtgctgctcaaggccgagcgcggcgagatcgacccgctcaccatcaccgccgaccagtacgacctcgtctgcaacggcgtggagctctcttccggcgcggtccgtaaccacgaccctgagatcatgatcaaggccttcgagctcgtccgcctcggcgaagaggacgtgaaggccaagttccccgccatgtacaacgccttctgctacggcgcgcccccgcacgccggtatcgccccgggcgtcgaccgcatggtcatgctgctcgccggtgaagattccatccgcgagatcattcccttcccgatgaacaagaacgcccaggatatcatgatgggcgcgcccagcgaggtgacgcagaagcagctcgatgagctgcatattgcggtcacggcgcatgaggaagaataatttagctctcactgcgtgagggtgcaatggtttccctgcgccgcgcgggggaacggcaaaaggggggctattctctttccgaggaaagagaatagccccccttacaccccccaagagaaagggacgaggggcctttcccctcgaccccgcacattggcagtctcgatcttgaagagctgctcagcctgcggaatcgggtgcggtgtacatggcttcgccatgaatccctgcgagtcgttacctctctcaaccgcgccttactatcgtgaggcgcgagtgacgtttgcttggcggcggactgcatgccgaatgcggcattgctgcgctcgccgcattgagtagtgcctcggtaaacgggaattaggctgtactcctacaagataggcagagcggcagcggatgataggagcagaggcaaatcgtatagcagttctaaacgcggcaacgccgcgcgcaggaagtagcatcggcaagcattgcagctcttcgagctgctcgcttgcaatgtgaaaacctttctcttgggggatttaaagggggatattctcttttgtgaaagagaatatccccctttgcccgctccccttgaactgcaccccatttgttagacagtatgatatactatctaagaagtggggtgttttgctatgccaaaaggagtaccaaacaaacgatatacgccggagttcaagggaatggttgtagaaaccatgaaaaaagaacatctgagtatctatgcagcgatgcaggaattcggaattaacgaccataaaattatagagcgttgggaacgcatttatctggaagaagggccggaagggttagccatcgaacggcgcggccgcggcagtaagggtcgtccgccaaagcagttgccgaagcaggtggaagaagatctgctggccgaagtgcagcgactgcgtgcggagaacgattacctaaaaaacttgcaagccttggttttggaagacgagcgacgccagcgcagaaaacgcaggtagttcaaaagctgaggcaaagacattctctggatattcttctctcaatcgctcaactgccccgtgccactttctactatcatctgaagcggatgaacagtgcagataagtataaagctgtga

SEQ ID NO: 27 - RNA, 1306 nt, Gemmiger formicilis
  source 1..1306: mol_type = rRNA
aaaaggatttattcgcttcaggatggactcgcgtccaattagctagttggtgaggtaacggcccaccaaggcgacgattggtagccggactgagaggttgaacggccacattgggactgagacacggcccagactcctacgggaggcagcagtgggggatattgcacaatgggggaaaccctgatgcagcgacgccgcgtggaggaagaaggttttcggattgtaaactcctgtcgttagggacgataatgacggtacctaacaagaaagcaccggctaactacgtgccagcagccgcggtaaaacgtagggtgcaagcgttgtccggaattactgggtgtaaagggagcgcaggcggaccggcaagttggaagtgaaaactatgggctcaacccataaattgctttcaaaactgctggccttgagtagtgcagaggtaggtggaattcccggtgtagcggtggaatgcgtagatatcgggaggaacaccagtggcgaaggcgacctactgggcaccaactgacgctgaggctcgaaagcatgggtagcaaacaggattagataccctggtagtccatgccgtaaacgatgattactaggtgttggaggattgaccccttcagtgccgcagttaacacaataagtaatccacctggggagtacgaccgcaaggttgaaactcaaaggaattgacgggggcccgcacaagcagtggagtatgtggtttaattcgaagcaacgcgaagaaccttaccaggtcttgacatccgatgcatagcgcagagatgcgtgaagtccttcgggacatcgagacaggtggtgcatggttgtcgtcagctcgtgtcgtgagatgttgggttaagtcccgcaacgagcgcaacccttattgccagttactacgcaagaggactctggcgagactgccgttgacaaaacggaggaaggtggggatgacgtcaaatcatcatgccctttatgacctgggctacacacgtactacaatggcgtttaacaaagagaagcaagaccgcgaggtggagcaaaactcaaaaacaacgtctcagttcagattgcaggctgcaactcgcctgcatgaagtcggaattgctagtaatcgcggatcagcatgccgcggtgaatacgttcccgggccttgtacacaccgcccgtcacaccatgagagccggggggacccgaagtcggtagtctaaccgcaaggaggacgccgccgaaggtaaaactggtgattggggtgaagtcgtaacaaggtagccgtatcggaaggtgcggctggatcacctccttt
